(19) United States
(12) Patent Application Publication
(10) Pub. No.: US 2022/0228157 A1
(43) Pub. Date: Jul. 21, 2022

(54) GENE EDITING IN DIVERSE BACTERIA

(71) Applicant: President and Fellows of Harvard College, Cambridge, MA (US)

(72) Inventors: George M. Church, Cambridge, MA (US); Timothy M. Wannier, Cambridge, MA (US); Gabriel T. Filsinger, Cambridge, MA (US)

(73) Assignee: President and Fellows of Harvard College, Cambridge, MA (US)

(21) Appl. No.: 17/613,216

(22) PCT Filed: May 21, 2020
(86) PCT No.: PCT/US2020/034025

§ 371 Date: Nov. 22, 2021

Related U.S. Application Data
(60) Provisional application No. 62/951,471, filed on Dec. 20, 2019.
(60) Provisional application No. 62/852,244, filed on May 23, 2019.

(51) Int. Cl. C12N 15/70; C12N 1/20; C12N 15/74; C12N 15/90; C12N 9/22; C07K 14/005

(52) U.S. Cl. CPC C12N 15/70; C12N 1/20; C12N 15/746; C12N 2510/00; C12N 9/22; C07K 14/005; C12N 2795/00043; C12N 15/90

(57) ABSTRACT

Provided herein, in some aspects are high efficiency gene editing methods in bacterial cells using single-stranded annealing proteins and/or single-stranded binding proteins.

### RELATED APPLICATIONS

[0001] This application is a U.S. national stage application claiming the benefit of international application number PCT/US2020/034025 filed on May 21, 2020, which claims the benefit under 35 U.S.C. § 119(e) of U.S. provisional application No. 62/852,244 filed on May 23, 2019 and U.S. provisional application Ser. No. 62/951,471 filed on Dec. 20, 2019, each of which is incorporated by reference herein in its entirety.

### GOVERNMENT LICENSE RIGHTS

[0002] This invention was made with government support under DE-FG02-02ER63445 awarded by the U.S. Department of Energy. The government has certain rights in the invention.

### REFERENCE TO A SEQUENCE LISTING SUBMITTED AS A TEXT FILE VIA EFS-WEB

[0003] This application contains a Sequence Listing which has been submitted in ASCII format via EFS-Web and is hereby incorporated by reference in its entirety. Said ASCII copy, created on Jan. 21, 2022, is named H049870689US02-SUBSEQ-FL.TXT and is 1,029,796 bytes in size.

### BACKGROUND

[0004] Recombineering was introduced as a term in 2001 to refer to a method for integrating linear double-stranded DNA¹ (dsDNA) or synthetic single-stranded DNA oligonucleotides (ssDNA or oligonucleotides (oligos))² into the Escherichia coli (E. coli) genome by expression of the Red operon from Enterobacteria phage λ. The Red operon comprises three genes: 1) λ Exo, a 5′ to 3′ dsDNA exonuclease that loads Redβ onto resected ssDNA^{3,4}; 2) Redβ, a single-stranded annealing protein (SSAP) that anneals ssDNA to genomic DNA at the replication fork⁵; and 3) λ Gam, a bacterial nuclease inhibitor that protects linear dsDNA from degradation⁶. Redβ, the SSAP, is required for recombineering of both ssDNA and dsDNA, whereas λ Exo and λ Gam are thought to be involved in recombineering of dsDNA. Improvements to the efficiency of ssDNA recombineering in E. coli have been made through the knockout of mismatch repair machinery⁷ and the protection of oligos from nucleolytic degradation⁸. These improvements spurred the development of multiplexed automatable genome engineering (MAGE), a technique that for the first time envisioned the bacterial genome as a massively editable template. MAGE was applied notably to the full genomic recoding of E. coli MG1655⁹ (removal of all amber stop codons—TAG), which has subsequently become a model chassis organism for biocontainment¹⁰ and non-standard amino acid (NSAA) studies^{11,12}.

### SUMMARY

[0005] The present disclosure is based, at least in part, on unexpected data showing that pairs of single-stranded annealing proteins (SSAPs) and single-stranded binding proteins (SSBs) can be used to efficiently edit the genomes of a variety of bacterial species (not only E. coli) with cross-species specificity. In some embodiments, the SSAPs and SSBs are from entirely different species of bacteriophage, relative to each other, yet can still be used together for efficient recombineering. The data herein also unexpectedly demonstrate that a pair of SSB and SSAP can be used to integrate into the genome of a host cell an exogenous double-stranded nucleic acid, even in the absence of an exogenous exonuclease (e.g., a cognate exogenous exonuclease). As used herein, an exonuclease is capable of removing successive nucleotides from the end of a nucleic acid. An exonuclease may be a double-stranded exonuclease that is useful in generating a nucleic acid comprising single-stranded nucleotide overhangs. An exogenous exonuclease is an exonuclease that is introduced into a cell. A cognate exogenous exonuclease is an exonuclease that is from the same species as a SSAP, SSB, or combination thereof that is introduced into a cell.

[0006] Accordingly, provided herein, in some embodiments, are SSAPs that may be used together with species-matched or species-unmatched SSBs for use in editing the genome of cells (e.g., recombineering).

[0007] Provided herein, in some embodiments, are recombineering tools for efficient gene editing (e.g., multiplex genomic editing) in microbial cells, such as bacterial cells. The principal limitation of recombineering technology is that Redβ, does not function well in non-E. coli bacterial species. Species-specific SSAPs have been reported for other hosts, but in comparison to E. coli, where ssDNA recombineering efficiency has been reported at over 20%¹³, reported editing efficiency in non-E. coli hosts is as low as 0.01% and no more than 1%^{14,15}. Applications such as genomic recoding, strain engineering, or other engineering goals that require the ability to massively edit a bacterial genome are not currently possible outside of E. coli (i.e., without bacterial species). Furthermore, even the efficiency that has been previously reported in E. coli (˜20-30%) remains a limiting factor to more advanced applications that utilize a more efficient gene-editing tool. For instance, 321 edits were made to the E. coli MG1655 genome to recode all TAGs to TAA, but this process took about 4 years and necessitated conjugation steps to assemble the genome from partially-recoded parts. To remove or alter another native codon, thousands of mutations would need to be made. Provided herein is a more efficient editing tool to make feasible the kinds of applications that require hundreds to thousands of mutations within a shorter period of time.

### BRIEF DESCRIPTION OF THE DRAWINGS

[0008] FIGS. 1A-1B show matrices testing all combinations of the top seven enriched SSBs against the top four enriched SSAPs in E. coli (FIG. 1A) and L. lactis (FIG. 1B).

[0009] FIGS. 2A-2C show results of editing efficiency testing for SSAPs and SSAP/single-stranded binding (SSB) pairs from experiments using E. coli (FIG. 2A), L. lactis (FIG. 2B), and M. smegmatis (FIG. 2C).

[0010] FIG. 3 show the results of multiplex incorporation of edits in E. coli populations expressing either an efficient SSAP (SEQ ID NO: 157), an efficient SSAP/SSB pair (SEQ ID NO: 157-SEQ ID NO: 384), or the widely-used Redβ (EC-Bet).

[0011] FIGS. 4A-4C show the results of various experiments testing the SSAP comprising the sequence of SEQ ID NO: 24, a high-efficiency SSAP from Pseudomonas aeruginosa (P. Aeruginosa) that was identified by an early experiment with E. coli. FIG. 4A shows that the SSAP SEQ ID NO: 24 displays improved annealing kinetics in vitro. FIG. 4B shows that the SSAP SEQ ID NO: 24 is improved over Redβ in many clinically relevant species of Gammaproteobacteria. FIG. 4C shows that in P. aeruginosa, the SSAP SEQ ID NO: 24 enables rapid multi-drug resistance profiling.

[0012] FIG. 5 shows top individual SSAPs SEQ ID NO: 157 and SEQ ID NO: 24 expressed in E. coli from a high-activity promoter. The mutational profile of edits are shown, including the efficiency of making 18-nucleotide (NT) and 30-NT mismatches.

[0013] FIGS. 6A-6B show that co-expression of an SSAP/SSB pair that facilitates the integration of double-stranded cassettes. FIG. 6A shows erythromycin colony forming units (CFUs) after expression of SSAP SEQ ID NO: 24 alone, or co-expressed with its corresponding SSB (PaSSB, SEQ ID NO: 472) or exonuclease. The SSAP/SSB pair alone is enough for cassette insertion. FIG. 6B shows that EcSSAP (Redβ) performs slightly better with its associated exonuclease, but the SSAP/SSB pair alone performs nearly as well.

[0014] FIG. 7 shows editing efficiency in Agrobacterium tumefaciens expressing SSAP SEQ ID NO: 143 in combination with either SSB SEQ ID NO: 310 or SSB SEQ ID NO: 368. Editing efficiency of close to 1% was measured in SSAP SEQ ID NO: 143/SSB SEQ ID NO: 310.

[0015] FIGS. 8A-8B include graphs showing frequency and enrichment of members of Broad RecT Library over ten rounds of SEER enrichment. FIG. 8A shows the frequency of the library members. FIG. 8B shows the enrichment of library members.

[0016] FIGS. 9A-9E show recombineering results with a broad RecT Library and CspRecT. FIG. 9A is a graph in which frequency is plotted against enrichment for each Broad RecT Library member after the tenth round of selection. One candidate protein, CspRecT (box), was the standout winner. In all subsequent panels, Redβ, PapRecT, and CspRecT are compared when expressed from a pORTMAGE-based construct (FIG. 10) in wild-type MG1655 E. coli. Significance values are indicated for a grouped parametric t-test, where ns and ***** indicate p >0.05 and p <0.0001 respectively. FIG. 9B is a graph in which editing efficiency was measured by blue/white screening at the LacZ locus for eight different single-base mismatches (n=3). FIG. 9C is a graph in which editing efficiency was measured by blue/white screening at the LacZ locus for 18-base and 30-base mismatches (n=3). FIG. 9D shows a sample MAGE experiment that tested editing at 1, 5, 10, 15, or 20 sites at once in triplicate, was read out by NGS. The solid lines represent the average editing efficiency across all sites, while the dashed lines represent the aggregate editing efficiency. FIG. 9E shows a 130-oligo DIvERGE experiment using oligos that were designed to tile four different genomic loci that encode the drug targets of fluoroquinolone antibiotics and are known hotspots for CIP resistance. The oligos contained 1.5% degeneracy at each nucleotide position along their entire length. All 130 oligos were mixed and transformed together into cells (n=3). Colony forming units were measured at three different CIP concentrations after plating 1/100^{th} of the final recovery volume.

[0017] FIGS. 10A-10B are schematics showing vector maps. FIG. 10A shows pARC8-DEST, which was created to have a pBAD regulatory region, beta lactamase, a p15a origin, and a lethal ccdB gene flanked by attR sites for Gateway cloning. Introduction by the LR Gateway reaction of for instance SR001, would create the vector on the right, with an arabinose-inducible SR001 followed by a barcode. FIG. 10B shows two pORTMAGE vectors are provided for broad-spectrum recombineering. pORTMAGE-Ec1 was demonstrated effective in E. coli, C. freundii, and K. pneumoniae, while pORTMAGE-Pa1 was demonstrated effective in P. aeruginosa.

[0018] FIGS. 11A-11C depict recombineering in Gammaproteobacteria. FIG. 11A shows results of recombineering experiments that were run with Redβ, PapRecT, and CspRecT expressed off of the pORTMAGE311B backbone, or with a pBBR1 origin in the case of P. aeruginosa. Editing efficiency was measured by colony counts on selective vs. non-selective plates (n=3; see methods). Vector optimization resulted in improved efficiency of PapRecT in P. aeruginosa (see FIG. 13) FIG. 11B is a diagram of a simple multi-drug resistance experiment in P. aeruginosa harboring an optimized PapRecT plasmid expression system, pORTMAGE-Pa1. In a single round of MAGE, a pool of five oligos was used to incorporate genetic modifications that would provide resistance to STR, RIF, and CIP (n=3). These populations were then selected by plating on all combinations of 1-, 2-, or 3-antibiotic agarose plates and compared with a non-selective control. FIG. 11C shows observed efficiencies that were calculated by comparing colony counts on selective vs. non-selective plates. Expected efficiencies for multi-locus events were calculated as the product of all relevant single-locus efficiencies.

[0019] FIG. 12 is a graph showing recombineering efficiency in P. aeruginosa was measured for PapRecT with E. coli codons, PapRecT with its wild-type codons, and two SSAPs that have been reported to work in Pseudomonas putida. This was measured both with the original pORTMAGE311B RBS and an RBS optimized for P. aeruginosa. Significance values are indicated for a parametric t-test between two groups, where ns, *, **, ***, and ***** indicate p >0.05, p <0.05, p <0.01, p <0.001, and p <0.0001 respectively.

[0020] FIG. 13 shows editing efficiency in making a single-base mutation at the rpsL locus in P. aeruginosa with various plasmid variants expressing PapRecT. An unoptimized plasmid (far left) was constructed by replacing, in pORTMAGE312B (Addgene), the RSF1010 origin of replication and the kanamycin resistance gene with a pBBR1 origin of replication and a gentamicin resistance gene. The best-performing plasmid variant (third from right) was renamed pORTMAGE-Pa1 (Addgene). Constructs examining the role of MutL in single-base recombineering efficiency were made by first restoring wild-type PaMutL and then by removing it entirely (second from right, and far right respectively).

[0021] FIG. 14 shows results with one round of MAGE with a pool of three oligos that confer Ciprofloxacin resistance was conducted in P. aeruginosa with pORTMAGE-Pa1. Editing efficiency is shown after plating on three different concentrations of antibiotic.

[0022] FIG. 15 shows the effect of codon-usage on Redβ editing efficiency in E. coli. The efficiency of Redβ from the Broad SSAP Library was compared with Redβ expressed off of its wild-type codons. Efficiency of making a single base pair mutation in a non-coding gene was measured by next generation sequencing (NGS).

[0023] FIGS. 16A-16B include data showing the editing efficiency and growth rates of bacteria expressing a candidate from the Broad SSAP Library or Redβ. FIG. 16A shows the efficiency of a candidate SSAP at incorporating a single-base-pair silent mutation at a non-essential gene, ynfF. Efficiency was read out by NGS. Significance values are indicated for a parametric t-test between two groups, where ns, *, **, ***, and ***** indicate p >0.05, p <0.05, p <0.01, p <0.001, and p <0.0001 respectively. FIG. 16B shows growth rates, which were measured by plate-reader growth assay and plotted against the maximum attained OD₆₀₀ of the culture.

[0024] FIGS. 17A-17H include data showing the editing efficiency in recombinant cells comprising RecTs, SSBs, or “cognate pairs.” FIG. 17A shows an in-vitro model of ssDNA annealing inhibition by EcSSB or L1SSB, and ability of λ-Red β to overcome annealing inhibition by EcSSB. FIG. 17B shows ssDNA annealing without SSB, precoated with EcSSB, or pre-coated with L1SSB. Shaded area represents the SEM of at least 2 replicates. FIG. 17C shows ssDNA annealing in the presence of λ-Red β when pre-coated with EcSSB or L1SSB. Shaded area represents the SEM of at least 2 replicates. FIG. 17D shows a model for RecT-mediated editing in the presence of SSB. An interaction between RecT and the host SSB enables oligo annealing to the lagging strand of the replication fork. **Co-expressing an exogenous SSB that is compatible with a particular RecT variant can in some species enable efficient homologous genome editing even if host compatibility does not exist. FIGS. 17E-17F show calculation of editing efficiency in L. lactis and E. coli is performed by introducing antibiotic resistance mutations into the genome using synthetic oligos, and then measuring the ratio of resistant cells to total cells. FIGS. 17G-17H show a comparison of the efficiency of editing in L. lactis and E. coli after the expression of either RecTs, SSBs, or “cognate pairs” (see, e.g., Example 10).

[0025] FIGS. 18A-18F include data showing genome editing efficiency using SSAP and chimeric SSB pairs. FIG. 18A shows a crystal structure of homotetrameric E. coli SSB bound to ssDNA (PDB-ID 1EYG)37. The amino acid sequence of the flexible C-terminal tail is diagramed in the right panel, along with the design of a 9AA C-terminal truncation to SSB. FIG. 18B shows a diagram of the L. lactis SSB C-terminal tail is diagramed, along with an example of an SSB C-terminal tail replacement. In this case, the 9 C-terminal amino acids of the L. lactis SSB are replaced with the corresponding residues from E. coli SSB. The notation “L1SSB C9:EcSSB” is used as shorthand. FIG. 18C shows editing efficiency in L. lactis of λ-Red β with a 9AA C-terminally truncated EcSSB mutant. The sequence shown for EcSSB (C10) corresponds to SEQ ID NO: 516. FIG. 18D shows editing efficiency in L. lactis of λ-Red β expressed with L1SSB, or mutants of L1SSB with C3, C7, C8, or C9 terminal residues replaced with the corresponding residues from EcSSB. The following sequences are shown from top to bottom: SEQ ID NOS: 532, 538-541 and 516. FIGS. 18E-18F show editing efficiency in L. lactis of PapRecT (FIG. 18E) or MspRecT (FIG. 18F) expressed with L1SSB, or mutants of L1SSB with the C7 or C8 terminal residues replaced with the corresponding residues from the cognate SSB. The following sequences are shown in FIG. 18E from top to bottom: SEQ ID NOS: 532, 542-543, and 520. The following sequences are shown in FIG. 18F from top to bottom: SEQ ID NOs: 532, 544-545, and 524.

[0026] FIGS. 19A-19F include data evaluating RecT compatibility with distinct bacterial SSBs and chimeric SSBs. FIGS. 19A-19B show heat maps showing the fold improvement in editing efficiency due to SSB coexpression in (FIG. 19A) L. lactis or (FIG. 19B) E. coli of RecT-SSB pairs as compared to the RecT alone. FIG. 19C shows C-terminal sequences of SSBs as well as RecT compatibility given FIGS. 19A and 19B.” The following sequences are shown from top to bottom: SEQ ID NOs: 516, 516, 516, 520, 524, 528, 532, and 535. FIG. 19D shows editing efficiency in L. lactis of PapRecT coexpressed with LrSSB, MsSSB, or mutants of LrSSB which had the C7 or C8 terminal residues replaced with the corresponding residues from the MsSSB. The following sequences are shown from top to bottom: SEQ ID NOS: 528, 546, 547, and 524. FIG. 19E shows editing efficiency in M. smegmatis of λ-Red β, PapRecT, MspRecT, and LrpRecT. FIG. 19F shows editing efficiency in L. rhamnosus of λ-Red β, PapRecT, MspRecT, and LrpRecT.

[0027] FIGS. 20A-20B show editing efficiency in C. crescentus using pairs of RecT and SSB. FIG. 20A shows editing efficiency in C. crescentus of two RecT-SSB protein pairs, λ-Red β+PaSSB and PapRecT+PaSSB which had high genome editing efficiency in both E. coli and L. lactis. FIG. 20B shows editing efficiency in C. crescentus of λ-Red β+PaSSB with ribosomal binding sites optimized for translation rate and using an oligo designed to evade mismatch repair.

[0028] FIG. 21 shows that in L. lactis, the internal RBS sequence affected recombination efficiency using the bicistronic Redβ and EcSSB construct. RBS 2, which enabled the highest efficiency genome editing in this experiment was selected used in all other bicistronic constructs unless otherwise indicated. The sequences for RBS1-RBS4 correspond to SEQ ID NOs: 509, 507, 510 and 511, respectively.

[0029] FIG. 22 shows design of RBSs for use in C. crescentus. Using the Salis et al. RBS calculator, RBSs were designed to confer a greater translation rate in order to increase RecT and SSB expression for the Caulobacter constructs. See, e.g., Salis et al. Nat. Biotechnol. 27, 946-50 (2009) and Borujeni et al. Nucleic Acids Res. 42, 2646-2659 (2014). The sequences shown correspond to SEQ ID NOS: 505, 506, 507, and 508 from top to bottom.

[0030] FIGS. 23A-23E includes data showing genome editing efficiency of L. lactis comprising PapRecT, and PaSSB. FIG. 23A shows that in L. lactis, optimization of nisin concentration contributed to a significant improvement in editing efficiency for the PapRecT protein and the PaSSB protein construct. 10 ng/mL nisin was much more effective than 1 ng/mL nisin and resulted in an increase in editing efficiency improvement from 0.5% to 8%. The optimal oligo amount plateaued at 50 μg of DNA, which corresponds 21.4 μM in 80 μL. FIG. 23B shows expression of the L. lactis MutL variant E33K allowed the efficient introduction of 1 bp mismatches at similar efficiency to 4 bp mismatches which evade MMR. FIG. 23C shows that after optimization from FIGS. 23A-23B, PapRecT+PaSSB+LlMutLE33K enabled ˜20% editing efficiency at the Rif locus, and multiplexed editing (FIG. 23D). FIG. 23E shows that co-expression of PapRecT+PaSSB enabled the efficient introduction of a 1 kb selectable marker as dsDNA even without the addition of the cognate phage exonuclease. This also was observed for Redb with EcSSB in L. lactis (Data not shown).

[0031] FIG. 24 shows the editing efficiency of SSAP candidates in Agrobacterium tumefaciens. Enrichment on the Y-axis is a measure of editing efficiency.

[0032] FIG. 25 shows the editing efficiency of SSAP candidates in Staphylococcus aureus. Enrichment on the Y-axis is a measure of editing efficiency.

### DETAILED DESCRIPTION

[0033] A library of 234 SSAPs was tested both individually and co-expressed with a library of 237 SSBs. These libraries were tested in E. coli and two model gram positive microbes: Lactococcus lactis (Firmicutes) and Mycobacterium smegmatis (Actinobacteria). L. lactis and M. smegmatis are important model systems, are distant relations of E. coli and of each other, and have had reports of low efficiency recombineering (L. lactis: ˜0.1%¹⁵; M. smegmatis: ˜0.01%¹⁴). L. lactis is an industrially-relevant microbe used in dairy production of kefir, buttermilk, and cheese, and is a human commensal. M. smegmatis is also a human commensal, and a fast-growing model system for M. tuberculosis. In fact, Firmicutes and Actinobacteria are two of the most highly-populated phyla of human commensals¹⁶.

[0034] Oligo recombineering efficiency was improved, as shown herein, in all three bacterial species: E. coli (40%), L. lactis (20%), and M. smegmatis (5%) enough to support high-throughput experimentation by recombineering without the need for selection. Top SSAPs were tested in the three chassis organisms, and in all cases supported significantly improved rates of oligo-mediated recombineering (FIGS. 1A-1C, FIG. 5). In the SSAP/SSB library, SSAPs and SSBs were both individually enriched, and so matrices were constructed of every combination of high-performing SSAPs and high-performing SSBs (FIGS. 2A-2B). Through testing these in a high-throughput assay and reading out efficiency by next-generation sequencing (NGS), the highest efficiency pairs were identified. These pairs performed better than any individual SSAP (FIGS. 1A-1C) and allowed for double-stranded DNA cassette integration, even in the absence of an exogenous exonuclease (FIGS. 6A-6B).

[0035] Next, the multiplex incorporation of edits in E. coli was tested, which was demonstrative of some of the more important applications enabled by the technology provided herein. The most efficient SSAP/SSB pair in E. coli incorporated at close to 100% efficiency (15 edits simultaneously) after a week of MAGE cycling, as compared to Redβ, which only did so at 20% efficiency (FIG. 3).

[0036] Finally, the efficiency of genome-editing was tested in species that had not been tested in the above-mentioned libraries. First, a highly-enriched SSAP from the E. coli experiments was tested in clinically relevant Gammaproteobacteria (FIGS. 4A-4C). It was found that the SSAP SEQ ID NO: 24 functions at high efficiency in Pseudomonas aeruginosa, where Redβ does not work. This allows for the reconstruction of antibiotic-resistant phenotypes at high efficiency in this host, which has developed significant resistance. Next, a library of co-expressed SSAP/SSB pairs (25 most-enriched SSBs and three most-enriched SSAPs across E. coli, L. lactis, and M. smegmatis) was tested in Agrobacterium tumefaciens. This 75 member library was enriched for the most active variants over two rounds of selective MAGE, and two of the most frequent pairs were isolated. The most active of these pairs showed close to 1% editing efficiency.

### Single-Stranded Annealing Protein (SSAP)

[0037] Aspects of the present disclosure provide single-stranded annealing proteins. Single-stranded annealing proteins (SSAPs) are recombinases that are capable of annealing an exogenous nucleic acid (any nucleic acid that is introduced into a cell) to a target locus in the genome of a cell. A SSAP may be from (e.g., derived from, obtained from, and/or isolated from) any SSAP superfamily, including RecT, ERF, RAD52, SAK, SAK4, and GP2.5. See, e.g., Iyer et al., BMC Genomics. 2002 Mar. 21; 3:8; Neamah et al., Nucleic Acids Res. 2017 Jun. 20; 45(11):6507-6519. In some instances, GP2.5 is from T7 phage. As a non-limiting example, SSAPs may be identified using the Pfam database. For example, RecT SSAPs may be identified under Pfam Accession No. PF03837, ERF SSAPs may be identified under Pfam Accession No. PF04404, and RAD 52 SSAPs may be identified under Pfam Accession No. PF04098.

[0038] As used herein, a SSAP may be from any source. For example, SSAPs may be from a virus or a bacteria. The source may be a eukaryote or a prokaryote. See, e.g., Table 1.

[0039] A SSAP may comprise a sequence that is least 50% (e.g., at least 55%, 60%, 65%, 70%, 71%, 72%, 73%, 74%, 75%, 76%, 77%, 78%, 79%, 80%, 81%, 82%, 83%, 84%, 85%, 86%, 87%, 88%, 89%, 90%, 91%, 92%, 93%, 94%, 95%, 96%, 97%, 98%, 99% or more than 99%, including all values in between) identical to a sequence selected from SEQ ID NOS: 1-234. In some instances, a SSAP comprises a sequence selected from SEQ ID NOS: 1-234. In some instances, a SSAP consists of a sequence selected from SEQ ID NOS: 1-234.

### Single-Stranded Binding Protein (SSB)

[0040] The SSAPs of the present disclosure may be used with a single-stranded binding protein (SSB). SSBs bind to single-stranded nucleic acids (e.g., single-stranded nucleic acids comprising deoxyribonucleotides, ribonucleotides, or a combination thereof). The binding of a SSB to a single-stranded nucleic acid can serve numerous functions. For example, SSB binding may protect a nucleic acid from degradation. In some instances, SSB binding to a single-stranded nucleic acid reduces the secondary structure of the nucleic acid, which may increase the accessibility of the nucleic acid to other enzymes (e.g., recombinases). SSB binding can also prevent re-annealing of complementary strands during replication. As a non-limiting example, SSBs may be identified using the Pfam database under Accession Number PF00436.

[0041] The SSBs of the present disclosure may be from any source. For example, SSBs may be from a virus or a bacteria. The source may be a eukaryote or a prokaryote. See, e.g., Table 1.

[0042] A SSB may comprise a sequence that is least 50% (e.g., at least 55%, 60%, 65%, 70%, 71%, 72%, 73%, 74%, 75%, 76%, 77%, 78%, 79%, 80%, 81%, 82%, 83%, 84%, 85%, 86%, 87%, 88%, 89%, 90%, 91%, 92%, 93%, 94%, 95%, 96%, 97%, 98%, 99% or more than 99%, including all values in between) identical to a sequence selected from SEQ ID NOS: 235-472. In some instances, a SSB comprises a sequence selected from SEQ ID NOS: 235-472. In some instances, a SSB consists of a sequence selected from SEQ ID NOS: 235-472.

[0043] In some embodiments, a SSB is a chimeric SSB and comprises SSB sequences from two different sources. To produce a chimeric SSB, one or more amino acids in the C-terminus of the SSB may be substituted. For example, at least 1, at least 2, at least 3, at least 4, at least 5, at least 6, at least 7, at least 8, at least 9, at least 10, at least 11, at least 12, at least 13, at least 14, at least 15, at least 16, at least 17, at least 18, at least 19, at least 20, at least 21, at least 22, at least 23, at least 24, at least 25, at least 26, at least 27, at least 28, at least 29, at least 30, at least 31, at least 32, at least 33, at least 34, at least 35, at least 36, at least 37, at least 38, at least 39, at least 40, at least 41, at least 42, at least 43, at least 44, at least 45, at least 46, at least 47, at least 48, at least 49, at least 50, at least 51, at least 52, at least 53, at least 54, at least 55, at least 56, at least 57, at least 58, at least 59, at least 60, at least 61, at least 62, at least 63, at least 64, at least 65, at least 66, at least 67, at least 68, at least 69, at least 70, at least 71, at least 72, at least 73, at least 74, at least 75, at least 76, at least 77, at least 78, at least 79, at least 80, at least 81, at least 82, at least 83, at least 84, at least 85, at least 86, at least 87, at least 88, at least 89, at least 90, at least 91, at least 92, at least 93, at least 94, at least 95, at least 96, at least 97, at least 98, at least 99, or at least 100 amino acids from the C-terminus of an SSB may be substituted. The C-terminus of a SSB may be substituted with at least 1, at least 2, at least 3, at least 4, at least 5, at least 6, at least 7, at least 8, at least 9, at least 10, at least 11, at least 12, at least 13, at least 14, at least 15, at least 16, at least 17, at least 18, at least 19, at least 20, at least 21, at least 22, at least 23, at least 24, at least 25, at least 26, at least 27, at least 28, at least 29, at least 30, at least 31, at least 32, at least 33, at least 34, at least 35, at least 36, at least 37, at least 38, at least 39, at least 40, at least 41, at least 42, at least 43, at least 44, at least 45, at least 46, at least 47, at least 48, at least 49, at least 50, at least 51, at least 52, at least 53, at least 54, at least 55, at least 56, at least 57, at least 58, at least 59, at least 60, at least 61, at least 62, at least 63, at least 64, at least 65, at least 66, at least 67, at least 68, at least 69, at least 70, at least 71, at least 72, at least 73, at least 74, at least 75, at least 76, at least 77, at least 78, at least 79, at least 80, at least 81, at least 82, at least 83, at least 84, at least 85, at least 86, at least 87, at least 88, at least 89, at least 90, at least 91, at least 92, at least 93, at least 94, at least 95, at least 96, at least 97, at least 98, at least 99, or at least 100 amino acids from the C-terminus of another SSB.

[0044] In some embodiments, a chimeric SSB is used together with an SSAP that is from a bacteriophage that is capable of infecting a type of bacteria. In such instances, the chimeric SSB may comprise a C-terminal sequence from an SSB from the same source as the source of the SSAP. In some embodiments, a chimeric SSB may comprise a C-terminal SSB sequence from a bacterium that the bacteriophage the SSAP is sourced from is capable of infecting. For example, a chimeric SSB may be used in a first type of bacterial cell with an SSAP from a bacteriophage that can infect, or from a prophage that is stably integrated into the genome of, a second type of bacterial cell. The chimeric SSB may comprise a sequence encoding an SSB from the first type of bacterial cell, in which the C-terminus of this first SSB is substituted with one or more amino acids from the C-terminus of a second SSB that is from the second type of bacterial cell that the bacteriophage can infect. As a non-limiting example, the SSAP PapRecT (SEQ ID NO: 24) may be used with a chimeric SSB comprising 7, 8, 9, or 10 amino acids of the C-terminus of PaSSB (SEQ ID NO: 472). In some instances, the chimeric SSB may comprise a C-terminal sequence that includes 1, 2, 3, 4, or 5 mutations relative to a C-terminal sequence from a SSB from a bacteriophage that is capable of infecting the same type of bacteria that the SSAP is capable of infecting.

[0045] In some embodiments, a chimeric SSB comprises a C-terminal sequence that is at least 70%, 80%, or at least 90% identical to a sequence selected from SEQ ID NOs: 516-547. In some embodiments, a chimeric SSB comprises a sequence selected from SEQ ID NOs: 516-547.

### Source of Proteins

[0046] The proteins of the present disclosure (e.g., SSAPs, SSBs, dominant negative mismatch repair enzymes, or exonucleases) may be from any source. As used herein, a source refers to any species existing in nature that naturally harbors the protein (e.g., SSAP, SSB, exonuclease, dominant negative mismatch repair enzyme, or a combination thereof). The term “naturally” refers to an event that occurs without human intervention. For example, certain bacteriophage naturally infect bacteria, delivering a SSAP and/or SSB; thus, some bacteria naturally harbor that SSAP and/or SSB. Non-limiting examples of suitable sources of SSAPs and SSBs are provided in Table 1.

[0047] Many viruses, including bacteriophages, naturally encode SSAP, SSB, exonuclease, dominant negative mismatch repair enzyme, or a combination thereof. Therefore, a source of a SSAP, SSB, exonuclease, dominant negative mismatch repair enzyme, or a combination thereof may be a virus. In some instances, the source of a SSAP, SSB, exonuclease, dominant negative mismatch repair enzyme, or a combination thereof is a bacteriophage. Bacteriophages or phages are viruses that infect bacteria and are often classified by the type of nucleic acid genome and morphology. For example, the genome of bacteriophages may be linear or circular, double-stranded or single-stranded, and may comprise deoxyribonucleotides (DNA) or ribonucleotides (RNA). After a phage inserts its genome into a bacterial host cell, the phage genome can be reproduced through the lysogenic cycle, lytic cycle, or the lysogenic cycle followed by the lytic cycle. During the lysogenic cycle, the phage genome is integrated into the host bacterium's genome. The infected bacterial cell remains intact during the lysogenic cycle and replicates the phage genome. In contrast, during the lytic cycle, the phage genome does not integrate into the host genome and the phage hijacks the host cell's machinery to replicate the phage genome, produce viral components, and assemble new viral phages. Once the new viral phages are formed, the phages lyse the host cell and are released. Viruses that infect non-bacterial host cells use similar mechanisms of replication. In some instances, the source of a SSAP, SSB, dominant negative mismatch repair enzyme, exonuclease, or a combination thereof is a virus that can infect a particular species. In some instances, the source of a SSAP, SSB, exonuclease, dominant negative mismatch repair enzyme, or a combination thereof is a bacteriophage that can infect, or from a prophage that is stably integrated into the genome of, a particular species of bacteria.

[0048] A source of a SSAP or SSB may also be a cell (e.g., a prokaryotic cell or a eukaryotic cell). As used herein, a cell that is a source of a SSAP or SSB is a cell existing in nature that harbors a gene encoding the SSAP or SSB. In some instances, the SSAP or SSB is a host gene (an endogenous gene). Since viruses naturally infect cells, a source of SSAP or SSB could also be a cell existing in nature that has been naturally infected by a virus that encodes that SSAP or SSB.

[0049] Non-limiting examples of phages include T7 (coliphage), T3 (coliphage), K1E (K1-capsule-specific coliphage), K1F (K1-capsule-specific coliphage), K1-5 (K1- or K5-capsule-specific coliphage), SP6 (Salmonella phage), LUZ19 (Pseudomonas phage), gh-1 (Pseudomonas phage), and K11 (Klebsiella phage).

[0050] Non-limiting examples of a source of a SSAP, SSB, dominant negative mismatch repair enzyme, an exonuclease or a combination thereof include [Clostridium] methylpentosum DSM 5476, Acetobacter orientalis 21F-2, Acinetobacter radioresistens SK82, Acinetobacter sp P8-3-8, Acinetobacter sp SH024, Actinobacteria bacterium OK074, Acyrthosiphon pisum secondary endosymbiont phage 1 (BacteriophageAPSE-1), Agathobacter rectalis (strain ATCC 33656/DSM 3377/JCM 17463/KCTC5835/VPI 0990) (Eubacterium rectale), Agrobacterium rhizogenes, Ahrensia sp R2A130, Akkermansia sp KLE1798, Anaerococcus hydrogenalis ACS-025-V-Sch4, Avibacterium paragallinarum JF4211, Bacillus phage 0305phi8-36, Bacillus phage SPP1 (Bacteriophage SPP1), Bacillus sp 1NLA3E, Bacillus sp 2_A_57_CT2, Bacillus sporothermodurans, Bacillus subtilis, Bacillus subtilis subsp spizizenii (strain TU-B-10), Jeotgalibacillus marinus, Bacillus subtilis subsp spizizenii (strain TU-B-10), Jeotgalibacillus marinus, Bacillus thuringiensis Sbt003, Escherichia coli VBL21-Gold(DE3)pLysS AG\′, Enterobacteria phage HK630, Enterobacteria phage lambda (Bacteriophage lambda), Escherichia coli TA280, Escherichia coli 1-176-05_S3_C2, Escherichia coli 40967, Bacteroides caccae ATCC 43185, Bartonella schoenbuchensis (strain DSM 13525/NCTC 13165/R1), Bifidobacterium magnum, Bifidobacterium reuteri DSM 23975, Bordetella bronchiseptica (Alcaligenes bronchisepticus), Bordetella phage BPP-1, Borrelia duttonii CR2A, Bradyrhizobium sp STM 3843, Brevibacillus brevis (strain 47/JCM 6285/NBRC 100599), Burkholderia cenocepacia (strain ATCC BAA-245/DSM 16553/LMG 16656/NCTC 13227/J2315/CF5610) (Burkholderia cepacia (strain J2315)), Burkholderia cenocepacia BC7, Burkholderia phage BcepC6B, Burkholderia phage BcepGomr, Burkholderia phage BcepNazgul, Burkholderia phage BcepNY3, Campylobacter coli 80352, Candidatus Accumulibacter sp SK-12, Candidatus Cloacimonas sp SDB, Capnocytophaga sp oral taxon 338 str F0234, Caulobacter vibrioides (strain ATCC 19089/CB15) (Caulobacter crescentus), Clostridium beijerinckii (strain ATCC 51743/NCIMB 8052) (Clostridiumacetobutylicum), Clostridium botulinum (strain Eklund 17B/Type B), Clostridium botulinum C str Eklund, Clostridium phage phiC2, Peptoclostridium difficile E15, Clostridium phage phiMMP03, Peptoclostridium difficile (Clostridium difficile), Clostridium sp CAG:470, Clostridium sp FS41, Clostridium sporogenes (strain ATCC 7955/DSM 767/NBRC 16411/NCIMB 8053/NCTC 8594/PA 3679), Collinsella stercoris DSM 13279, Commensalibacter intestini A911, Coriobacteriales bacterium DNF00809, Corynebacterium striatum ATCC 6940, Cryptobacterium curtum (strain ATCC 700683/DSM 15641/12-3), Cyanophage PSS2, Dermabacter sp HFH0086, Desulfitobacterium metallireducens DSM 15288, Desulfovibrio sp FW1012B, Dialister sp CAG:486, Drosophila melanogaster (Fruit fly), Elusimicrobium minutum (strain Pei191), Endozoicomonas montiporae, Endozoicomonas montiporae CL-33, Enterobacteria phage HK022 (Bacteriophage HK022), Enterobacteria phage HK629, Salmonella phage HK620 (Bacteriophage HK620), Enterobacteria phage T1 (Bacteriophage T1), Enterococcus faecalis (strain ATCC 700802/V583), Enterococcus faecalis TX0027, Enterococcus faecalis TX0309B, Enterococcus faecalis TX0309A, Enterococcus faecalis (strain ATCC 700802/V583), Escherichia coli, Escherichia phage Rtp, Escherichia phage Tls, Faecalibacterium sp CAG:82, Flavobacterium phage 11b, Frateuria aurantia (strain ATCC 33424/DSM 6220/NBRC 3245/NCIMB13370) (Acetobacter aurantius), Fusobacterium mortiferum ATCC 9817, Fusobacterium ulcerans 12-1B, gamma proteobacterium BDW918, Gordonia soli NBRC 108243, Gramella forsetii (strain KT0803), Haemophilus influenzae, Haemophilus influenzae NT127, Haemophilus paraphrohaemolyticus HK411, Haemophilus parasuis serovar 5 (strain SH0165), Hafnia alvei ATCC 51873, Helicobacter pullorum MIT 98-5489, Helicobacter sp MIT 05-5294, Herbaspirillum sp YR522, Homo sapiens (Human), Hungatella hathewayi DSM 13479, Hydrogenobacter thermophilus (strain DSM 6534/IAM 12695/TK-6), Hydrogenovibrio marinus, Klebsiella pneumoniae subsp rhinoscleromatis ATCC 13884, Komagataeibacter oboediens, Labilithrix luteola, Lactobacillus capillatus DSM 19910, Lactobacillus phage KC5a, Lactobacillus phage phi jlb1, Lactobacillus phage Lc-Nu, Lactobacillus phage phiadh, Lactobacillus phage phigle, Lactobacillus phage phijl1, Lactobacillus prophage Lj928, Lactobacillus johnsonii (strain CNCM 1-12250/La1/NCC 533), Lactobacillus prophage Lj965, Lactobacillus johnsonii (strain CNCM 1-12250/La1/NCC 533), Lactobacillus reuteri, Lactobacillus rossiae DSM 15814, Lactobacillus ruminis SPM0211, Lactobacillus shenzhenensis LY-73, Lactococcus lactis subsp cremoris (strain MG1363), Lactococcus lactis subsp lactis by diacetylactis str TIFN2, Lactococcus lactis subsp lactis (strain IL1403) (Streptococcuslactis), Lactococcus phage bIL309, Lactococcus lactis subsp lactis by diacetylactis str TIFN2, Lactococcus lactis subsp lactis (strain IL1403) (Streptococcuslactis), Lactococcus phage bIL309, Lactococcus phage bIL286, Lactococcus lactis subsp lactis (strain IL1403) (Streptococcuslactis), Lactococcus phage c2, Lactococcus phage LL-H (Lactococcus delbrueckii bacteriophage LL-H), Lactococcus phage phi311, Lactococcus phage ul36k1t1, Lactococcus phage ul362, Lactococcus phage ul361, Lactococcus lactis, Lactococcus phage ul36k1, Lactococcus phage phi311, Lactococcus phage ul36k1t1, Lactococcus phage ul362, Lactococcus phage ul361, Lactococcus lactis, Lactococcus phage ul36k1, Lactococcus phage SK1833, Lactococcus phage SK1, Legionella pneumophila, Leifsonia xyli subsp xyli, Leifsonia xyli subsp xyli (strain CTCB07), Leifsonia xyli subsp xyli, Leifsonia xyli subsp xyli (strain CTCB07), Lentibacillus amyloliquefaciens, Leptotrichia goodfellowii F0264, Leuconostoc mesenteroides subsp mesenteroides (strain ATCC 8293/NCDO 523), Listeria monocytogenes, Listeria phage A118 (Bacteriophage A118), Listeria phage A500 (Bacteriophage A500), Listeria phage B054, Listeria monocytogenes, Listeria welshimeri serovar 6b (strain ATCC 35897/DSM 20650/SLCC5334), Listeria phage PSA, Listonella phage phiHSIC, Mameliella alba, Methylobacterium nodulans (strain LMG 21967/CNCM 1-2342/ORS 2060), Methyloversatilis universalis (strain ATCC BAA-1314/JCM 13912/FAM5), Microbacterium ginsengisoli, Microgenomates group bacterium GW2011_GWF1_44_10, Mycobacterium brisbanense, Mycobacterium marinum (strain ATCC BAA-535/M), Mycobacterium phage Che8, Mycobacterium phage Che8/Mycobacterium smegmatis, Mycobacterium phage Hamulus, Mycobacterium phage Dante, Mycobacterium phage Ardmore, Mycobacterium phage Llij, Mycobacterium phage Drago, Mycobacterium phage Phatniss, Mycobacterium phage Spartacus, Mycobacterium phage Boomer, Mycobacterium phage SiSi, Mycobacterium phage PMC, Mycobacterium phage Ovechkin, Mycobacterium phage Ramsey, Mycobacterium phage Fruitloop, Mycobacterium phage SG4, Mycobacterium phage Hamulus, Mycobacterium phage Dante, Mycobacterium phage Ardmore, Mycobacterium phage Llij, Mycobacterium phage Drago, Mycobacterium phage Phatniss, Mycobacterium phage Spartacus, Mycobacterium phage Boomer, Mycobacterium phage SiSi, Mycobacterium phage PMC, Mycobacterium phage Ovechkin, Mycobacterium phage Ramsey, Mycobacterium phage Fruitloop, Mycobacterium phage SG4, Mycobacterium phage PhatBacter, Mycobacterium phage Elph10, Mycobacterium phage 244, Mycobacterium phage Cjw1, Mycobacterium phage Phrux, Mycobacterium phage Lilac, Mycobacterium phage Phaux, Mycobacterium phage Quink, Mycobacterium phage Pumpkin, Mycobacterium phage Murphy, Mycobacterium phage PhatBacter, Mycobacterium phage Elph10, Mycobacterium phage 244, Mycobacterium phage Cjw1, Mycobacterium phage Phrux, Mycobacterium phage Lilac, Mycobacterium phage Phaux, Mycobacterium phage Quink, Mycobacterium phage Pumpkin, Mycobacterium phage Murphy, Mycobacterium phage Troll4, Mycobacterium phage Gumball, Mycobacterium phage Nova, Mycobacterium phage SirHarley, Mycobacterium phage Adjutor, Mycobacterium phage Butterscotch, Mycobacterium phage PLot, Mycobacterium phage PBI1, Mycobacterium phage Troll4, Mycobacterium phage Gumball, Mycobacterium phage Nova, Mycobacterium phage SirHarley, Mycobacterium phage Adjutor, Mycobacterium phage Butterscotch, Mycobacterium phage PLot, Mycobacterium phage PBI1, Mycobacterium phage Wildcat, Mycobacterium smegmatis, Mycobacterium virus Che9c, Neisseria lactamica Y92-1009, Nitratireductor basaltis, Nitrolancea hollandica Lb, Nocardia farcinica (strain IFM 10152), Nocardia terpenica, Oligotropha carboxidovorans (strain ATCC 49405/DSM 1227/KCTC 32145/OM5), Paenibacillus alvei DSM 29, Paenibacillus curdlanolyticus YK9, Paenibacillus dendritiformis C454, Paenibacillus elgii B69, Paenibacillus lactis 154, Paenibacillus mucilaginosus 3016, Paenibacillus polymyxa (strain E681), Paenibacillus sp FSL R7-0331, Paenibacillus sp P1XP2, Paenibacillus terrae (strain HPL-003), Paeniclostridium sordellii (Clostridium sordellii), Parasutterella excrementihominis CAG:233, Parcubacteria bacterium 32_520, Parcubacteria group bacterium GW2011_GWA2_42_14, Pediococcus acidilactici DSM 20284, Pedobacter antarcticus, Pedobacter antarcticus 4BY, Pedobacter antarcticus, Pedobacter antarcticus 4BY, Pelobacter propionicus (strain DSM 2379/NBRC 103807/OttBd1), Peptoniphilus duerdenii ATCC BAA-1640, Persephonella marina (strain DSM 14350/EX-H1), Phormidium phage Pf-WMP3, Photobacterium profundum (strain SS9), Photorhabdus luminescens subsp laumondii (strain DSM 15139/CIP105565/TT01), Pirellula sp SH-Sr6A, Prevotella sp CAG:873, Prochlorococcus phage P-SSM2, Prochlorococcus phage P-SSP7, Pseudoalteromonas lipolytica SCSIO 04301, Pseudomonas aeruginosa 39016, Pseudomonas aeruginosa, Pseudomonas aeruginosa DHS01, Pseudomonas phage LKA5, Pseudomonas phage F116, Pseudomonas aeruginosa, Pseudomonas aeruginosa DHS01, Pseudomonas phage LKA5, Pseudomonas phage F116, Pseudomonas phage vB_Pae-Kakheti25, Pseudomonas phage vB_PaeP_C1-14_Or, Pseudomonas phage vB_PaeP_p2-10_Or1, Pseudomonas phage PaP3, Rhizobium loti (strain MAFF303099) (Mesorhizobium loti), Rhizobium sp CF080, Rhodothermus phage RM378, Roseateles depolymerans, Ruminococcus sp SR1/5, Saccharomyces cerevisiae, Saccharomyces cerevisiae (strain ATCC 204508/S288c) (BakerVs yeast), Saccharomyces cerevisiae YJM1250, Saccharomyces cerevisiae YJM451, Salinicoccus halodurans, Salinisphaera hydrothermalis C41B8, Salinispora tropica (strain ATCC BAA-916/DSM 44818/CNB-440), Salmonella phage SETP3, Salmonella phage SS3e, Salmonella typhimurium, Salmonella phage ST160, Salmonella phage ST64T (Bacteriophage ST64T), Serratia odorifera DSM 4582, Simkania negevensis (strain ATCC VR-1471/Z), Sodalis glossinidius (strain morsitans), Source, Sphingopyxis sp (strain 113P3), Spiroplasma kunkelii CR2-3x, Sporosarcina newyorkensis 2681, Staphylococcus aureus (strain Mu50/ATCC 700699), Staphylococcus phage 3A, Staphylococcus phage phi7401PVL, Streptococcus pneumoniae, Staphylococcus aureus (strain NCTC 8325), Staphylococcus phage Phil2, Staphylococcus aureus, Staphylococcus phage 47, Staphylococcus phage tp310-2, Staphylococcus phage 3A, Staphylococcus phage phi7401PVL, Streptococcus pneumoniae, Staphylococcus aureus (strain NCTC 8325), Staphylococcus phage Phil2, Staphylococcus aureus, Staphylococcus phage 47, Staphylococcus phage tp310-2, Staphylococcus phage 92, Staphylococcus phage CNPH82, Staphylococcus phage phi11 (Bacteriophage phi-11), Staphylococcus phage 80, Staphylococcus phage 52A, Staphylococcus aureus (strain NCTC 8325), Staphylococcus phage Pv1108, Staphylococcus phage SA97, Staphylococcus phage phi7247PVL, Staphylococcus phage phiETA3, Staphylococcus aureus, Staphylococcus phage phi5967PVL, Stigmatella aurantiaca (strain DW4/3-1), Streptococcus gallolyticus subsp gallolyticus TX20005, Streptococcus infantis SK970, Streptococcus phage 7201, Streptococcus phage A25, Streptococcus pyogenes, Streptococcus pyogenes serotype M2 (strain MGAS10270), Streptococcus pyogenes serotype M4 (strain MGAS10750), Streptococcus pyogenes serotype M3 (strain ATCC BAA-595/MGAS315), Streptococcus pyogenes GA06023, Streptococcus pyogenes STAB902, Streptococcus phage M102, Streptococcus phage MM1 1998, Streptococcus pneumoniae, Streptococcus phage MM1, Streptococcus phage Sfi21, Streptococcus phage V22, Streptococcus pneumoniae, Streptococcus pyogenes serotype M28 (strain MGAS6180), Streptococcus pyogenes, Temperate phage phiNIH11, Streptococcus pyogenes serotype M2 (strain MGAS10270), Streptococcus pyogenes serotype M3 (strain ATCC BAA-595/MGAS315), Streptococcus pyogenes STAB902, Streptococcus pyogenes STAB902, Streptococcus pyogenes, Streptococcus pyogenes serotype M3 (strain ATCC BAA-595/MGAS315), Streptomyces albulus, Streptomyces albus, Streptomyces albus J1074, Streptomyces coelicolor (strain ATCC BAA-471/A3(2)/M145), Streptomyces cyaneogriseus, Streptomyces cyaneogriseus subsp noncyanogenus, Streptomyces longwoodensis, Streptomyces noursei, Streptomyces noursei ATCC 11455, Streptomyces phage VWB, Streptomyces rimosus, Streptomyces rimosus subsp pseudoverticillatus, Streptomyces sp HPH0547, Sulfurovum sp F506-10, Synechococcus phage Syn5, Synechococcus sp UTEX 2973, Synechocystis sp PCC 6803, Thalassomonas phage BA3, Thermaerobacter marianensis (strain ATCC 700841/DSM 12885/JCM10246/7p75a), Thermus phage phiYS40, Thiorhodovibrio sp 970, Treponema socranskii subsp socranskii VPI DR56BR1116=ATCC 35536, Ureaplasma urealyticum serovar 10 (strain ATCC 33699/Western), Ureaplasma urealyticum serovar 7 str ATCC 27819, Ureaplasma parvum serovar 3 (strain ATCC 700970), Ureaplasma urealyticum serovar 8 str ATCC 27618, Ureaplasma urealyticum serovar 4 str ATCC 27816, Ureaplasma urealyticum serovar 12 str ATCC 33696, Vibrio cholerae (strain MO10), Vibrio cholerae, Providencia alcalifaciens Ban1, Vibrio cholerae Ind4, Vibrio cholerae (strain MO10), Vibrio cholerae, Providencia alcalifaciens Ban1, Vibrio cholerae Ind4, Vibrio cholerae 1587, Vibrio natriegens NBRC 15636=ATCC 14048=DSM 759, Xanthobacter autotrophicus (strain ATCC BAA-1158/Py2), Xanthomonas phage OP2, Yersinia phage YpsP-G, Yersinia phage phiA1122, Yersinia phage YpsP-G, and Yersinia phage phiA1122. Other sources may be used.

[0051] The source, in some embodiments, is a bacterial cell. The bacterial strain may be, for example, Yersinia spp., Escherichia spp., Klebsiella spp., Agrobacterium spp., Acinetobacter spp., Bordetella spp., Neisseria spp., Aeromonas spp., Franciesella spp., Corynebacterium spp., Citrobacter spp., Chlamydia spp., Hemophilus spp., Brucella spp., Mycobacterium spp., Legionella spp., Lactococcus spp., Rhodococcus spp., Pseudomonas spp., Helicobacter spp., Salmonella spp., Vibrio spp., Bacillus spp., Erysipelothrix spp., Salmonella spp., Streptomyces spp., Bacteroides spp., Prevotella spp., Clostridium spp., Bifidobacterium spp., or Lactobacillus spp. In some embodiments, the bacterial cells are probiotic cells. In some instances, the source is an Escherichia coli (E. coli) cell, a Lactococcus lactis (L. lactis) cell, Agrobacterium tumefaciens (A. tumefaciens), or a Mycobacterium smegmatis (M. smegmatis) cell.

[0052] The source may be a gram-positive bacterial cell. Gram-positive bacterial cells stain positive in a gram stain test and often comprise a thick layer of peptidoglycan in their cell walls. Non-limiting examples of gram-positive bacterial cells include Actinomyces spp., Alicyclobacillus spp., Alicyclobacillus acidoterrestris, Alicyclobacillus aeris, Alicyclobacillus contaminans, Alicyclobacillus cycloheptanicus, Alicyclobacillus dauci, Alicyclobacillus disulfidooxidans, Alicyclobacillus fastidiosus, Alicyclobacillus ferrooxydans, Alicyclobacillus fodiniaquatilis, Alicyclobacillus herbarius, Alicyclobacillus hesperidum, Alicyclobacillus kakegawensis, Alicyclobacillus macrosporangiidus, Alicyclobacillus montanus, Alicyclobacillus pomorum, Alicyclobacillus sacchari, Alicyclobacillus sendaiensis, Alicyclobacillus shizuokensis, Alicyclobacillus tengchongensis, Alicyclobacillus tolerans, Alicyclobacillus vulcanalis, Arcanobacterium spp., Bacillus spp., Bacillus mojavensis, Bavariicoccus spp., Brachybacterium spp., Brachybacterium alimentarium, Brachybacterium aquaticum, Brachybacterium conglomeratum, Brachybacterium endophyticum, Brachybacterium faecium, Brachybacterium fresconis, Brachybacterium ginsengisoli, Brachybacterium horti, Brachybacterium huguangmaarense, Brachybacterium massiliense, Brachybacterium muris, Brachybacterium nesterenkovii, Brachybacterium paraconglomeratum, Brachybacterium phenoliresistens, Brachybacterium rhamnosum, Brachybacterium sacelli, Brachybacterium saurashtrense, Brachybacterium squillarum, Brachybacterium tyrofermentans, Brachybacterium zhongshanense, Brevibacterium linens, Collinsella stercoris, Clostridioides, Clostridioides difficile (bacteria), Clostridium spp., Clostridium acetobutylicum, Clostridium aerotolerans, Clostridium argentinense, Clostridium autoethanogenum, Clostridium baratii, Clostridium beijerinckii, Clostridium bifermentans, Clostridium botulinum, Clostridium butyricum, Clostridium cadaveris, Clostridium cellobioparum, Clostridium cellulolyticum, Clostridium cellulovorans, Clostridium chauvoei, Clostridium clostridioforme, Clostridium colicanis, Clostridium estertheticum, Clostridium fallax, Clostridium formicaceticum, Clostridium histolyticum, Clostridium innocuum, Clostridium kluyveri, Clostridium ljungdahlii, Clostridium novyi, Clostridium paradoxum, Clostridium paraputrificum, Clostridium pasteurianum, Clostridium perfringens, Clostridium phytofermentans, Clostridium piliforme, Clostridium ragsdalei, Clostridium ramosum, Clostridium saccharobutylicum, Clostridium saccharoperbutylacetonicum, Clostridium scatologenes, Clostridium septicum, Clostridium sordellii, Clostridium sporogenes, Clostridium stercorarium, Clostridium sticklandii, Clostridium straminisolvens, Clostridium tertium, Clostridium tetani, Clostridium thermosaccharolyticum, Clostridium tyrobutyricum, Clostridium uliginosum, Cnuibacter spp., Coriobacteriia spp., Corynebacterium, Corynebacterium amycolatum, Corynebacterium bovis, Corynebacterium diphtheriae, Corynebacterium efficiens, Corynebacterium glutamicum, Corynebacterium granulosum, Corynebacterium jeikeium, Corynebacterium macginleyi, Corynebacterium minutissimum, Corynebacterium renale, Corynebacterium ulcerans, Cutibacterium acnes, Deinococcus marmoris, Desulfitobacterium dehalogenans, Effusibacillus consociatus, Effusibacillus lacus, Effusibacillus pohliae, Enterococcus spp., Enterococcus faecalis, Fervidobacterium changbaicum, Fervidobacterium gondwanense, Fervidobacterium islandicum, Fodinibacter spp., Fodinibacter luteus, Gordonia soli, Georgenia ruanii, Humibacillus spp., Intrasporangium spp., Janibacter spp., Knoellia spp., Knoellia aerolata, Knoellia flava, Knoellia locipacati, Knoellia remsis, Knoellia sinensis, Knoellia subterranea, Kribbia spp., Kribbia dieselivorans, Kyrpidia spormannii, Kyrpidia tusciae, Lactobacillus spp., Lactobacillus acidophilus, Lactobacillus buchneri, Lactobacillus casei, Lactococcus lactis, Lactobacillus plantarum, Lactococcus lactis, Lapillicoccus spp., Lapillicoccus jejuensis, Listeriaceae spp., Marihabitans spp., Marihabitans asiaticum, Microbispora corallina, Mycobacterium smegmatis, Nocardia spp., Nocardia asteroides, Nocardia brasiliensis, Nocardia farcinica, Nocardia ignorata, Nonpathogenic organisms, Ornithinibacter spp., Ornithinibacter aureus, Paeniclostridium sordellii, Pasteuria spp., Phycicoccus spp., Pilibacter spp., Propionibacterium freudenreichii, Rathayibacter toxicus, Rhodococcus equi, Roseburia spp., Rothia dentocariosa, Sarcina spp., Solibacillus spp., Sporosarcina spp., Sporosarcina aquimarina, Sporulation in Bacillus subtilis, Staphylococcus, Staphylococcus aureus, Staphylococcus capitis, Staphylococcus caprae, Staphylococcus epidermidis, Staphylococcus haemolyticus, Staphylococcus hominis, Staphylococcus lugdunensis, Staphylococcus lutrae, Staphylococcus muscae, Staphylococcus nepalensis, Staphylococcus pettenkoferi, Staphylococcus pseudintermedius, Staphylococcus saprophyticus, S, Staphylococcus schleiferi, Staphylococcus succinus, Staphylococcus warneri, Staphylococcus xylosus, Streptococcus spp., Streptococcus agalactiae, Streptococcus anginosus, Streptococcus canis, Streptococcus downei, Streptococcus equi, Streptococcus bovis, Streptococcus gordonii, Streptococcus iniae, Streptococcus lactarius, Streptococcus mitis, Streptococcus mutans, Streptococcus oralis, Streptococcus parasanguinis, Streptococcus peroris, Streptococcus pneumoniae, Streptococcus pyogenes, Streptococcus ratti, Streptococcus salivarius, Streptococcus sanguinis, Streptococcus sobrinus, Streptococcus suis, Streptococcus thermophilus, Streptococcus tigurinus, Streptococcus uberis, Streptococcus vestibularis, Syntrophomonas curvata, Syntrophomonas palmitatica, Syntrophomonas sapovorans, Syntrophomonas wolfei, Syntrophomonas zehnderi, Tumebacillus algifaecis, Tumebacillus avium, Tumebacillus flagellatus, Tumebacillus ginsengisoli, Tumebacillus lipolyticus, Tumebacillus luteolus, Tumebacillus permanentifrigoris, Tumebacillus soli, and Viridans streptococci.

[0053] The source may be a gram-negative bacterial cell. Gram-negative bacterial cells do not retain the stain in a Gram staining test and often comprise a thinner peptidoglycan layer in their cell walls as compared to gram-positive bacterial cells. Non-limiting examples of gram-negative bacteria include Vibrio aerogenes, Acidaminococcus spp., Acinetobacter baumannii, Agrobacterium tumefaciens, Akkermansia glycaniphila, Akkermansia muciniphila, Anaerobiospirillum, Anaerolinea thermolimosa, Anaerolinea thermophila, Arcobacter spp., Arcobacter skirrowii, Armatimonas rosea, Azotobacter salinestris, Bacteroides spp., Bacteroides caccae, Bacteroides fragilis, Bacteroides thetaiotaomicron, Bacteroides ureolyticus, Bacteroidetes spp., Bartonella japonica, Bartonella koehlerae, Bartonella taylorii, Bdellovibrio spp., Brachyspira spp., Bradyrhizobium japonicum, Budviciaceae spp., Caldilinea aerophila, Cardiobacterium spp., Cardiobacterium hominis, Chaperone-Usher fimbriae, Chishuiella spp., Christensenella spp., Caulobacter crescentus, Chthonomonas calidirosea, Citrobacter freundii, Coxiella burnetii, Cytophaga spp., Dehalogenimonas lykanthroporepellens, Desulfurobacterium atlanticum, Devosia pacifica, Devosia psychrophila, Devosia soli, Devosia subaequoris, Devosia submarina, Devosia yakushimensis, Dialister spp., Dictyoglomus thermophilum, Dinoroseobacter shibae, Enterobacter spp., Enterobacter cloacae, Enterobacter cowanii, Escherichia spp., Escherichia coli, Escherichia fergusonii, Escherichia hermannii, Fimbriimonas ginsengisoli, Flavobacterium spp., Flavobacterium akiainvivens, Fusobacterium necrophorum, Fusobacterium nucleatum, Fusobacterium polymorphum, Gluconacetobacter diazotrophicus, Haemophilus felis, Haemophilus haemolyticus, Haemophilus influenzae, Haemophilus pittmaniae, Helicobacter spp., Helicobacter bizzozeronii, Helicobacter heilmannii s.s, Helicobacter heilmannii sensu lato, Helicobacter salomonis, Helicobacter suis, Helicobacter typhlonius, Kingella kingae, Klebsiella huaxiensis, Klebsiella pneumoniae, Kluyvera ascorbata, Kluyvera cryocrescens, Kozakia baliensis, Legionella spp., Legionella clemsonensis, Legionella pneumophila, Leptonema illini, Leptotrichia buccalis, Levilinea saccharolytica, Luteimonas aestuarii, Luteimonas aquatica, Luteimonas composti, Luteimonas lutimaris, Luteimonas marina, Luteimonas mephitis, Luteimonas vadosa, Mariniflexile spp., Megasphaera spp., Meiothermus spp., Meiothermus timidus, Methylobacterium fujisawaense, Morax-Axenfeld diplobacilli, Moraxella spp., Moraxella bovis, Moraxella osloensis, Morganella morganii, Mycoplasma spumans, Neisseria cinerea, Neisseria gonorrhoeae, Neisseria meningitidis, Neisseria polysaccharea, Neisseria sicca, Nitrosomonas eutropha, Nitrosomonas halophila, Nitrosomonas stercoris, Pelosinus spp., Propionispora vibrioides, Proteus mirabilis, Proteus penneri, Pseudomonas spp., Pseudomonas aeruginosa, Pseudomonas luteola, Pseudomonas teessidea, Pseudoxanthomonas broegbernensis, Pseudoxanthomonas japonensis, Rickettsia parkeri, Rickettsia rickettsii, Salinibacter ruber, Salmonella spp., Salmonella bongori, Salmonella enterica, Samsonia spp., Serratia marcescens, Shigella spp., Shimwellia spp., Solobacterium moorei, Sorangium cellulosum, Sphaerotilus natans, Sphingomonas gei, Sphingosinicella humi, Spirochaeta spp., Sporomusa spp., Stenotrophomonas spp., Stenotrophomonas nitritireducens, Thermotoga neapolitana, Thorselliaceae spp., Vampirococcus spp., Verminephrobacter spp., Vibrio spp., Vibrio adaptatus, Vibrio azasii, Vibrio campbellii, Vibrio cholerae, Victivallis vadensis, Vitreoscilla spp., Wolbachia spp., Yersinia spp., and Zymophilus paucivorans.

### Mismatch Repair Enzymes

[0054] Mismatch repair enzymes are involved in the detection of distortions in the secondary structure of DNA caused by incorrectly paired nucleotides and correction of these mismatches. Non-limiting examples of mismatch repair enzymes include MutS, MutH and MutL. Dominant negative mismatch repair enzymes disable mismatch repair. Non-limiting examples of dominant negative MutL include a dominant negative MutL protein that comprises an amino acid substitution corresponding to E32K in E. coli wild-type MutL (SEQ ID NO: 514), E33K in L. lactis wild-type MutL (SEQ ID NO: 512), or E36K in P. aeruginosa wild-type MutL (SEQ ID NO: 548). See, e.g., SEQ ID NOs: 515, 513, or 549.

[0055] Without being bound by a particular theory, a dominant negative mismatch repair enzyme may be from the same source as recombinant cell in which is being expressed.

### Variants

[0056] The proteins described herein (e.g., SSAPs, SSBs, dominant negative mismatch repair enzymes or exonucleases) may contain one or more amino acid substitutions relative to its wild-type counterpart. Variants can be prepared according to methods for altering polypeptide sequence known to one of ordinary skill in the art such as are found in references which compile such methods, e.g. Molecular Cloning: A Laboratory Manual, J. Sambrook, et al., eds., Second Edition, Cold Spring Harbor Laboratory Press, Cold Spring Harbor, N.Y., 1989, or Current Protocols in Molecular Biology, F. M. Ausubel, et al., eds., John Wiley & Sons, Inc., New York. Conservative substitutions of amino acids include substitutions made amongst amino acids within the following groups: (a) M, I, L, V; (b) F, Y, W; (c) K, R, H; (d) A, G; (e) S, T; (f) Q, N; and (g) E, D.

[0057] It should be understood that the present disclosure encompasses the use of any one or more of the SSAPs, SSBs, dominant negative mismatch repair enzymes, or exonucleases described herein as well as a SSAP, SSB, dominant negative mismatch repair enzyme, or exonuclease that share a certain degree of sequence identity with a reference protein. The term “identity” refers to a relationship between the sequences of two or more polypeptides or polynucleotides, as determined by comparing the sequences. Identity measures the percent of identical matches between the smaller of two or more sequences with gap alignments (if any) addressed by a particular mathematical model or computer program (e.g., “algorithms”). Identity of related molecules can be readily calculated by known methods. “Percent (%) identity” as it applies to amino acid or nucleic acid sequences is defined as the percentage of residues (amino acid residues or nucleic acid residues) in the candidate amino acid or nucleic acid sequence that are identical with the residues in the amino acid sequence or nucleic acid sequence of a second sequence after aligning the sequences and introducing gaps, if necessary, to achieve the maximum percent identity. Identity depends on a calculation of percent identity but may differ in value due to gaps and penalties introduced in the calculation. Variants of a particular sequence may have at least 70%, 75%, 80%, 85%, 90%, 91%, 92%, 93%, 94%, 95%, 96%, 97%, 98%, 99% but less than 100% sequence identity to that particular reference sequence, as determined by sequence alignment programs and parameters described herein and known to those skilled in the art.

[0058] The comparison of sequences and determination of percent identity between two sequences can be accomplished using a mathematical algorithm. Techniques for determining identity are codified in publicly available computer programs. Exemplary computer software to determine homology between two sequences include, but are not limited to, GCG program package (Devereux, J. et al. Nucleic Acids Research, 12(1): 387, 1984), the BLAST suite (Altschul, S. F. et al. Nucleic Acids Res. 25: 3389, 1997), and FASTA (Altschul, S. F. et al. J. Molec. Biol. 215: 403, 1990). Other techniques include: the Smith-Waterman algorithm (Smith, T. F. et al. J. Mol. Biol. 147: 195, 1981; the Needleman-Wunsch algorithm (Needleman, S. B. et al. J. Mol. Biol. 48: 443, 1970; and the Fast Optimal Global Sequence Alignment Algorithm (FOGSAA) (Chakraborty, A. et al. Sci Rep. 3: 1746, 2013).

### Homologous Recombination-Mediated Genetic Engineering (Recombineering)

[0059] Aspects of the present disclosure provide methods of homologous recombination-mediated genetic engineering (recombineering) to produce modified cells. The modified cell may be gram-positive or gram-negative. Recombineering refers to integration of an exogenous nucleic acid into the genome of a cell using homologous recombination (genetic recombination in which nucleotide sequences are exchanged between two similar nucleic acid molecules). As used herein, an exogenous nucleic acid is any nucleic acid that is introduced into a cell.

[0060] The recombineering methods described herein comprise culturing a recombinant cell that comprises (1) any of the SSAPs described herein and (2) a exogenous nucleic acid comprising a sequence of interest that binds to a target locus. The exogenous nucleic acid may be single-stranded or double-stranded and may comprise ribonucleotides, deoxyribonucleotides, unnatural nucleotides, or a combination thereof. Unnatural nucleotides are nucleic acid analogues and include peptide nucleic acid (PNA), morpholine, locked nucleic acid (LNA), as well as glycol nucleic acid (GNA), threose nucleic acid (TNA). In some instances, a recombinant cell further comprises a SSB, an exonuclease or a combination thereof. For example, a recombinant cell that is capable of integrating an exogenous nucleic acid that is double-stranded may further comprise an exonuclease and SSB. The exonuclease can be used to generate 3′ overhangs of single-stranded nucleic acids for hybridization to a target locus. In some embodiments, the methods further comprise introducing a SSAP, a SSAP and a SSB, SSAP, SSB, and dominant negative mismatch repair enzyme, or a SSAP, SSB, and an exonuclease into the cell.

[0061] The exogenous nucleic acid comprising a sequence of interest for use in recombineering is capable of hybridizing to a target locus. The exogenous nucleic acid may be 100% complementary to the target locus or may comprise a nucleotide modification relative to the target locus. Nucleotide modifications include mutations, deletions, insertions, and unnatural nucleotides. In some instances, the exogenous nucleic acid comprises at least 1, at least 2, at least 3, at least 4, at least 5, at least 6, at least 7, at least 8, at least 9, at least 10, at least 11, at least 12, at least 13, at least 14, at least 15, at least 16, at least 17, at least 18, at least 19, at least 20, at least 25, at least 30, at least 35, at least 40, at least 45, at least 50, at least 55, at least 60, at least 65, at least 70, at least 75, at least 80, at least 85, at least 90, at least 95, at least 100, at least 200, at least 300, at least 400, or at least 500 nucleotide modifications relative to the target locus for integration. In some instances, the exogenous nucleic acid comprises a sequence that is at least 10%, at least 20%, at least 30%, at least 40%, at least 50%, at least 60%, at least 70%, at least 80%, at least 90%, or at least 100% complementary to the target locus for integration.

[0062] In some instances, the exogenous nucleic acid comprises a contiguous stretch of nucleotides that is complementary to the target locus for integration. The contiguous stretch of nucleotides may be at least 1, at least 2, at least 3, at least 4, at least 5, at least 6, at least 7, at least 8, at least 9, at least 10, at least 11, at least 12, at least 13, at least 14, at least 15, at least 16, at least 17, at least 18, at least 19, at least 20, at least 25, at least 30, at least 35, at least 40, at least 45, at least 50, at least 55, at least 60, at least 65, at least 70, at least 75, at least 80, at least 85, at least 90, at least 95, at least 100, at least 200, at least 300, at least 400, or at least 500 in length.

[0063] In some instances, the exogenous nucleic acid comprises (1) a sequence of interest that is not complementary to the target locus for integration, and (2) flanking sequences (e.g., 10 to 500 nucleotides in length) on either side of the sequence of interest that are each complementary to the target locus for integration. In some instances, the exogenous nucleic acid does not comprise flanking sequences that are each complementary to the target locus for integration.

[0064] In some instances, the exogenous nucleic acid does not comprise a contiguous stretch of nucleotides that is complementary to the target locus for integration, but is still capable of binding to the target locus. For example, an exogenous nucleic acid may comprise a sequence that has a mutation at every other nucleotide relative to the target locus, but still binds to the target locus.

[0065] One type of recombineering is multiplex automated genomic engineering (MAGE), in which more than one locus in a cell is simultaneously targeted (e.g., targeted for modification). To carry out MAGE, more than one exogenous nucleic acid is introduced into a cell. In some instances, more than one exogenous nucleic acid targeting at least 1, at least 2, at least 3, at least 4, at least 5, at least 6, at least 7, at least 8, at least 9, at least 10, at least 11, at least 12, at least 13, at least 14, at least 15, at least 16, at least 17, at least 18, at least 19, at least 20, at least 25, at least 30, at least 35, at least 40, at least 45, at least 50, at least 55, at least 60, at least 65, at least 70, at least 75, at least 80, at least 85, at least 90, at least 95, at least 100, at least 200, at least 300, at least 400, at least 500, at least 600, at least 700, at least 800, at least 900, at least 1,000, at least 2,000, at least 3,000, at least 4,000, at least 5,000, at least 6,000, at least 7,000, at least 8,000, at least 9,000, or at least 10,000 loci in the genome of a cell are introduced into a cell. In some instances, two or more exogenous nucleic acids target the same locus in the genome of a cell. In some instances, at least two exogenous nucleic acids target different loci in the genome of a cell.

[0066] As used herein, one cycle of recombineering refers to one round of inducing integration of an exogenous nucleic acid comprising a sequence of interest in one or more cells (e.g., in a population of cells). When the SSAP, SSB, exonuclease, dominant negative mismatch repair enzyme, or a combination thereof is present on an expression vector that comprises a constitutive promoter, induction of integration of an exogenous nucleic acid may comprise introduction of one or more nucleic acids encoding a SSAP, a SSB, dominant negative mismatch repair enzyme, an exonuclease, or a combination thereof and introduction of the exogenous nucleic acid encoding a sequence of interest. When expression of SSAP, SSB, exonuclease, dominant negative mismatch repair enzyme, or a combination thereof is under the control of an inducible promoter and the recombinant cell already comprises a nucleic acid encoding an inducible promoter operably linked to the nucleic acid encoding SSAP, SSB, dominant negative mismatch repair enzyme, exonuclease, or a combination thereof, induction of integration of an exogenous nucleic acid may comprise culturing the cell in the presence of an inducing reagent and introducing the exogenous nucleic acid to the cell. As a non-limiting example, one round of recombineering in a bacteria host cell may comprise (1) growing cells that comprise at least one exogenous nucleic acid encoding an SSAP, SSAP/SSB pair, SSAP, SSB, and dominant negative mismatch repair enzyme, or SSAP, SSB and exonuclease; (2) inducing expression of proteins if expression is under the control of an inducible promoter; (3) making the cells competent (e.g., usually placing the cells on ice and washing with water, but this step may by organism); (4) introducing one or more exogenous nucleic acids comprising a sequence of interest into the cells (e.g., by electroporation); and (5) allowing the cells to rest. For MAGE, each cycle of recombineering may further comprise introducing multiple exogenous nucleic acids targeting at least two different loci in the genome of a cell. See, e.g., Wang et al., Nature. 2009 Aug. 13; 460(7257):894-898.

[0067] In some instances, the methods comprise at least 1 cycle, at least 2 cycles, at least 3 cycles, at least 4 cycles, at least 5 cycles, at least 6 cycles, at least 7 cycles, at least 8 cycles, at least 9 cycles, at least 10 cycles, at least 20 cycles, at least 30 cycles, at least 40 cycles, at least 50 cycles, at least 60 cycles, at least 70 cycles, at least 80 cycles, at least 90 cycles, at least 100 cycles, at least 200 cycles, at least 300 cycles, at least 400 cycles, at least 500 cycles, at least 600 cycles, at least 700 cycles, at least 800 cycles, at least 900 cycles, or at least 1,000 cycles of recombineering. For example, the method of recombineering could be MAGE.

[0068] The efficiency of recombineering may be measured by any suitable method that detects integration of a sequence of interest into a target locus. As a non-limiting example, the target locus of interest may be amplified in cells following introduction and/or induction of a SSAP, SSB, dominant negative mismatch repair enzyme, an exonuclease, or a combination thereof and sequenced. Polymerase chain reaction (PCR) may be used to amplify the target locus and sequencing methods include Sanger sequencing and next generation sequencing (massively parallel sequencing) technologies. The efficiency of recombineering can be calculated as the frequency of modified alleles compared to the total number of alleles detected in a cell or in a population of cells. In instances in which the target locus to be modified encodes a protein, changes in the activity level of the protein may be used to determine editing efficiency. For example, the editing efficiency of a SSAP, a SSAP and a SSB, SSAP, SSB, and dominant negative mismatch repair enzyme, or a SSAP, SSB, and an exonuclease may be measured in a bacterial cell by using an exogenous nucleic acid encoding a modification to the LacZ locus, which encodes β-galactosidase, and the efficiency of recombineering can be measured as the level of LacZ disruption. Disruption of LacZ can be measured in a β-galactosidase assay. See also, e.g., the Materials and Methods section of the Examples below.

[0069] In some instances, the efficiency of recombineering is measured as the percentage of cells comprising the integrated sequence of interest.

[0070] The efficiency of recombineering using any of the methods described herein may be at least 0.5%, at least 1%, at least 2%, at least 3%, at least 4%, at least 5%, at least 6%, at least 7%, at least 8%, at least 9%, at least 10%, at least 15%, at least 20%, at least 25%, at least 30%, at least 35%, at least 40%, at least 45%, at least 50%, at least 55%, at least 60%, at least 65%, at least 70%, at least 75%, at least 80%, at least 85%, at least 90%, at least 95%, or 100%.

[0071] In some instances, a recombinant cell comprising a SSAP, a SSB, dominant negative mismatch repair enzyme, an exonuclease, or a combination thereof has a recombineering efficiency that is at least 2-fold, at least 3-fold, at least 4-fold, at least 5-fold, at least 6-fold, at least 7-fold, at least 8-fold, at least 9-fold, at least 10-fold, at least 15-fold, at least 20-fold, at least 25-fold, at least 30-fold, at least 35-fold, at least 40-fold, at least 45-fold, at least 50-fold, at least 55-fold, at least 60-fold, at least 65-fold, at least 70-fold, at least 75-fold, at least 80-fold, at least 85-fold, at least 90-fold, at least 95-fold, at least 100-fold, at least 200-fold, at least 300-fold, at least 400-fold, at least 500-fold, at least 600-fold, at least 700-fold, at least 800-fold, at least 900-fold, or at least 1,000 fold greater as compared to a control cell that is of the same type as the recombinant cell but that does not comprise the SSAP, the SSB, dominant negative mismatch repair enzyme, the exonuclease, or the combination thereof. In some instances, the control cell comprises Redβ SSAP from Enterobacteria phage λ.

[0072] As a non-limiting example, a nucleic acid sequence encoding Redβ SSAP from Enterobacteria phage λ is:

(SEQ ID NO: 473)
ATGAGTACTGCACTTGCAACATTAGCTGGCAAGTTAGCAGAGCGTGTTGG
TATGGATTCAGTCGACCCTCAGGAGCTTATAACTACCTTACGTCAAACAG
CGTTCAAGTGTGACGCCTCTGATGCACAATTTATCGCTTTGCTTATCGTA
GCTAACCAGTATGGGTTGAATCCTTGGACGAAGGAGATATACGCTTTCCC
GGATAAGCAGAACGGTATTGTTCCTGTAGTAGGTGTCGATGGATGGAGTA
GAATTATCAATGAAAATCAACAGTTCGATGGCATGGACTTCGAGCAGGAT
AATGAATCATGTACCTGCCGTATATATAGAAAAGACCGAAATCACCCAAT
TTGTGTGACTGAATGGATGGATGAGTGCAGACGTGAGCCGTTCAAGACCC
GAGAAGGCCGTGAAATCACTGGTCCGTGGCAATCACATCCAAAGAGAATG
TTGCGTCACAAGGCGATGATTCAGTGCGCCCGTTTAGCTTTTGGGTTTGC
TGGCATTTACGACAAGGACGAAGCTGAAAGAATCGTTGAAAACACTGCAT
ATACCGCTGAACGACAACCGGAGCGTGACATTACGCCAGTGAATGACGAG
ACAATGCAGGAAATTAACACGTTGTTGATTGCTTTGGACAAAACGTGGGA
CGACGACTTGTTACCACTTTGTAGCCAAATTTTTCGTCGAGACATTAGAG
CTTCATCTGAGCTTACACAAGCTGAAGCCGTCAAGGCATTGGGGTTTTTG
AAACAAAAAGCTACCGAACAGAAGGTAGCGGCATAA.

[0073] As an example, an amino acid sequence encoding Redβ SSAP from Enterobacteria phage λ is:

(SEQ ID NO: 474)
MSTALATLAGKLAERVGMDSVDPQELITTLRQTAFKCDASDAQFIALLIV
ANQYGLNPWTKEIYAFPDKQNGIVPVVGVDGWSRIINENQQFDGMDFEQD
NESCTCRIYRKDRNHPICVTEWMDECRREPFKTREGREITGPWQSHPKRM
LRHKAMIQCARLAFGFAGIYDKDEAERIVENTAYTAERQPERDITPVNDE
TMQEINTLLIALDKTWDDDLLPLCSQIFRRDIRASSELTQAEAVKALGFL
KQKATEQKVAA.

[0074] The efficiency of recombineering may be measured after at least 1 cycle, at least 2 cycles, at least 3 cycles, at least 4 cycles, at least 5 cycles, at least 6 cycles, at least 7 cycles, at least 8 cycles, at least 9 cycles, at least 10 cycles, at least 20 cycles, at least 30 cycles, at least 40 cycles, at least 50 cycles, at least 60 cycles, at least 70 cycles, at least 80 cycles, at least 90 cycles, at least 100 cycles, at least 200 cycles, at least 300 cycles, at least 400 cycles, at least 500 cycles, at least 600 cycles, at least 700 cycles, at least 800 cycles, at least 900 cycles, or at least 1,000 cycles of recombineering. For example, the method of recombineering could be MAGE.

[0075] The efficiency of recombineering may be measured after at least 1 day, at least 2 days, at least 3 days, at least 4 days, at least 5 days, at least 6 days, at least 7 days, at least 8 days, at least 9 days, at least 10 days, at least 20 days, at least 30 days, at least 40 days, at least 50 days, at least 60 days, at least 70 days, at least 80 days, at least 90 days, at least 100 days, at least 200 days, at least 300 days, at least 400 days, at least 500 days, at least 600 days, at least 700 days, at least 800 days, at least 900 days, or at least 1,000 days of recombineering. In some instances, the method of recombineering is MAGE. The recombinant cell may be of any species and may be a prokaryotic cell or a eukaryotic cell. In some instances, the recombinant cell is a bacterial cell. The bacterial strain may be, for example, Yersinia spp., Escherichia spp., Klebsiella spp., Agrobacterium spp., Acinetobacter spp., Bordetella spp., Neisseria spp., Aeromonas spp., Franciesella spp., Corynebacterium spp., Citrobacter spp., Chlamydia spp., Hemophilus spp., Brucella spp., Mycobacterium spp., Legionella spp., Lactococcus spp., Rhodococcus spp., Pseudomonas spp., Helicobacter spp., Salmonella spp., Vibrio spp., Bacillus spp., Erysipelothrix spp., Salmonella spp., Streptomyces spp., Bacteroides spp., Prevotella spp., Clostridium spp., Bifidobacterium spp., or Lactobacillus spp. In some embodiments, the bacterial cells are probiotic cells. In some instances, the recombinant cell is an Escherichia coli (E. coli) cell, a Lactococcus lactis (L. lactis) cell, Agrobacterium tumefaciens (A. tumefaciens), or a Mycobacterium smegmatis (M. smegmatis) cell.

[0076] A recombinant cell may comprise an SSAP, a SSB, dominant negative mismatch repair enzyme, an exonuclease, or a combination thereof that is not naturally expressed in the cell. When a recombinant cell comprises a SSAP and a SSB, the SSAP and SSB may be the same source or from a different source. The source may be the same or different species from that of the recombinant cell. In some instances, a recombinant cell may comprise a SSAP, a SSB, and an exonuclease that are all from different sources. In some instances, at least one protein selected from the SSAP, the SSB, and the exonuclease is from a source that is the same species as the recombinant cell. In some instances, the sources of all three proteins (the SSAP, the SSB, and the exonuclease) are of a different species as compared to the recombinant cell. In some instances, at least one protein selected from the SSAP, the SSB, the dominant negative mismatch repair enzyme, and the exonuclease is from a source that is the same species as the recombinant cell.

[0077] To make any of the proteins (e.g., SSAPs, SSBs, dominant negative mismatch repair enzyme, or exonucleases) described herein, a protein of interest can be selected and expressed in a cell using conventional methods, including recombinant technology. For example, a nucleic acid encoding a SSAP, SSB, exonuclease, dominant negative mismatch repair enzyme, or a combination thereof may be introduced into a cell. A nucleic acid, generally, is at least two nucleotides covalently linked together, and in some instances, may contain phosphodiester bonds (e.g., a phosphodiester “backbone”). A nucleic acid is considered “engineered” if it does not occur in nature. Examples of engineered nucleic acids include recombinant nucleic acids and synthetic nucleic acids. In some embodiments, an engineered nucleic acid encodes a SSAP, SSB, exonuclease, dominant negative mismatch repair enzyme, or a combination thereof. In some embodiments, a SSAP or SSB is encoded by separate nucleic acids, while in other embodiments, a single nucleic acid may encode a SSAP and a SSB (e.g., each operably linked to a different promoter, or both operably linked to the same promoter).

[0078] Nucleic acids encoding the SSAP, SSB, dominant negative mismatch repair enzyme, exonuclease, or a combination thereof described herein may be introduced into a cell using any known methods, including but not limited to chemical transfection, viral transduction (e.g. using lentiviral vectors, adenovirus vectors, sendaivirus, and adeno-associated viral vectors) and electroporation. For example, methods that do not require genomic integration include transfection of mRNA encoding one or more of the SSAPs, SSBs, or a combination thereof and introduction of episomal plasmids. In some embodiments, the nucleic acids (e.g., mRNA) are delivered to cells using an episomal vector (e.g., episomal plasmid). In other embodiments, nucleic acids encoding a SSAP, SSB, exonuclease, dominant negative mismatch repair enzyme, or a combination thereof may be integrated into the genome of the cell. Genomic integration methods are known, any of which may be used herein, including the use of the PIGGYBAC™ transposon system, sleeping beauty system, lentiviral system, adeno-associated virus system, and the CRISPR gene editing system.

[0079] In some embodiments, an engineered nucleic acid is present on an expression plasmid, which is introduced into pluripotent stem cells. In some embodiments, the expression plasmid comprises a selection marker, such as an antibiotic resistance gene (e.g., bsd, neo, hygB, pac, cat, ble, or bla) or a gene encoding a fluorescent protein (RFP, BFP, YFP, or GFP). In some embodiments, an antibiotic resistance gene encodes a puromycin resistance gene. In some embodiments, the selection marker enables selection of cells expressing a SSAP, SSB, exonuclease, dominant negative mismatch repair enzyme, or a combination thereof.

[0080] Any of the engineered nucleic acids described herein may be generated using conventional methods. For example, recombinant or synthetic technology may be used to generate nucleic acids encoding the SSAP, SSB, exonuclease, dominant negative mismatch repair enzyme, or a combination thereof described herein. Conventional cloning techniques may be used to insert a SSAP, SSB, exonuclease, dominant negative mismatch repair enzyme, or a combination thereof into an expression plasmid.

[0081] In some embodiments, an engineered nucleic acid (optionally present on an expression plasmid) comprises a nucleotide sequence encoding a SSAP, SSB, exonuclease, dominant negative mismatch repair enzyme, or a combination thereof operably linked to a promoter (promoter sequence). In some embodiments, the promoter is an inducible promoter (e.g., comprising a tetracycline-regulated sequence). Inducible promoters enable, for example, temporal and/or spatial control of SSAP, SSB, exonuclease, dominant negative mismatch repair enzyme, or a combination thereof expression.

[0082] A promoter control region of a nucleic acid sequence at which initiation and rate of transcription of the remainder of a nucleic acid sequence are controlled. A promoter may also contain sub-regions at which regulatory proteins and molecules may bind, such as RNA polymerase and transcription factors. Promoters may be constitutive, inducible, activatable, repressible, tissue-specific or any combination thereof. A promoter drives expression or drives transcription of the nucleic acid sequence that it regulates. Herein, a promoter is considered to be “operably linked” when it is in a correct functional location and orientation in relation to a nucleic acid sequence it regulates to control (“drive”) transcriptional initiation and/or expression of that sequence.

[0083] An inducible promoter is one that is characterized by initiating or enhancing transcriptional activity when in the presence of, influenced by or contacted by an inducing agent. An inducing agent may be endogenous or a normally exogenous condition, compound or protein that contacts an engineered nucleic acid in such a way as to be active in inducing transcriptional activity from the inducible promoter.

[0084] Inducible promoters for use in accordance with the present disclosure include any inducible promoter described herein or known to one of ordinary skill in the art. Examples of inducible promoters include, without limitation, chemically/biochemically-regulated and physically-regulated promoters such as saccharide-regulated promoters (e.g., arabinose-responsive promoter and xylose-responsive promoters) alcohol-regulated promoters, tetracycline-regulated promoters (e.g., anhydrotetracycline (aTc)-responsive promoters and other tetracycline responsive promoter systems, which include a tetracycline repressor protein (tetR), a tetracycline operator sequence (tetO) and a tetracycline transactivator fusion protein (tTA)), steroid-regulated promoters (e.g., promoters based on the rat glucocorticoid receptor, human estrogen receptor, moth ecdysone receptors, and promoters from the steroid/retinoid/thyroid 25 receptor superfamily), metal-regulated promoters (e.g., promoters derived from metallothionein (proteins that bind and sequester metal ions) genes from yeast, mouse and human), pathogenesis-regulated promoters (e.g., induced by salicylic acid, ethylene or benzothiadiazole (BTH)), temperature/heat-inducible promoters (e.g., heat shock promoters), and light-regulated promoters (e.g., light responsive promoters from plant cells). In some instances, the promoter (e.g., for use in E. Coli) is an arabinose inducible promoter. As a non-limiting example, the arabinose inducible promoter is a rhamnose-inducible promoter or pL from lamda phage. In some instances, the inducible promoter is a nisin inducible promoter. For example, a nisin inducible promoter may be used in Lactis spp. In some instances, the inducible promoter is a tetracycline inducible promoter. As a non-limiting example, a tetracycline inducible promoter may be used in Mycobacterium spp.

[0085] In some instances, the promoter is a p23 promoter (i.e., an auto-inducible expression system comprising the srfA promoter (P_{srfA}), which could be activated by the signal molecules acting in the quorum-sensing pathway for competence). See, e.g., Guan et al., Microb Cell Fact. 2016 Apr. 25; 15:66. For example, a p23 promoter may be used in Staphylococcus aureus or in Bacillus subtillis cells.

[0086] As used herein, a native promoter refers to a promoter that is naturally operably linked to a nucleic acid encoding a protein of interest (e.g., SSAP or SSB) and a non-native promoter refers to a promoter that is not naturally operably linked to a nucleic acid encoding the protein of interest (e.g., a SSAP or SSB). For example, as long as the promoter does not naturally drive expression of a nucleic acid encoding a protein of interest, an engineered nucleic acid comprising a non-native promoter may be a promoter that naturally exists in a cell in which the engineered nucleic acid is introduced. In some instances, the non-native promoter on the engineered nucleic acid is a promoter that does not naturally exist in the cell in which the engineered nucleic acid is introduced. As a non-limiting example, a recombinant cell may comprise an engineered nucleic acid encoding a SSAP or SSB that is from a phage. The phage genome naturally comprises a promoter that naturally drives expression of the SSAP or SSB. In this case, a non-native promoter is a promoter that is not the phage promoter that normally drives expression of the SSAP or SSB. In some instances, a recombinant cell may comprise an engineered nucleic acid encoding a SSAP or SSB that is naturally encoded by the cell and the cell comprises a promoter that is operably linked to the nucleic acid encoding the SSAP or SSB. In this case, a non-native promoter is any promoter that is not the natural promoter in the cell that normally drives expression of the SSAP or SSB. In some instances, a recombinant cell may comprise an engineered nucleic acid encoding a SSAP or SSB that is naturally encoded by another cell and the other cell comprises a promoter that is operably linked to the nucleic acid encoding the SSAP or SSB. In this case, a non-native promoter is any promoter that is not the natural promoter in the other cell that normally drives expression of the SSAP or SSB.

[0087] Without being bound by a particular theory, use of a non-native promoter allows for expression of a SSAP, SSB, exonuclease, dominant negative mismatch repair enzyme, or a combination thereof above basal levels in a cell. In some instances, expression from a non-native promoter increases expression of a protein of interest (e.g., SSAP or SSB) by at least 1.5-fold, at least 2-fold, at least 3-fold, at least 4-fold, at least 5-fold, at least 10-fold, at least 20-fold, at least 30-fold, at least 40-fold, at least 50-fold, at least 60-fold, at least 70-fold, at least 80-fold, at least 90-fold, at least 100-fold, at least 200-fold, at least 300-fold, at least 400-fold, at least 500 fold, at least 600-fold, at least 700-fold, at least 800-fold, at least 900-fold, or at least 1,000-fold as compared to expression from the native promoter.

[0088] In some embodiments, a vector encoding a SSAP, SSB, exonuclease, dominant negative mismatch repair enzyme, or a combination thereof comprises a ribosome binding site (RBS). A RBS promotes initiation of protein translation. In some embodiments, a RBS comprises a sequence that is at least 50%, at least 60%, at least 70%, at least 80%, at least 90%, at least 91%, at least 92%, at least 93%, at least 94%, at least 95%, at least 96%, at least 97%, at least 98%, or at least 99% identical to a sequence selected from SEQ ID NOs: 505-511. In some embodiments, a RBS comprises a sequence selected from SEQ ID NOs: 505-511.

[0089] In some embodiments, a nucleic acid encoding a SSAP, SSB, exonuclease, dominant negative mismatch repair enzyme, or a combination thereof is codon-optimized for expression in a particular type of bacterial cell. In some embodiments, a nucleic acid encoding a SSAP, SSB, exonuclease, dominant negative mismatch repair enzyme, or a combination thereof is not codon-optimized.

### Additional Aspects and Embodiments of the Present Disclosure

[0090] In some aspects, the present disclosure provides a recombinant Escherichia coli (E. coli) cell comprising a single-stranded annealing protein (SSAP) selected from the group consisting of: a SSAP from a bacteriophage that can infect, or from a prophage that is stably integrated into the genome of, Thalassomonas phage, a SSAP from a bacteriophage that can infect, or from a prophage that is stably integrated into the genome of, Herbaspirillum sp., a SSAP from a bacteriophage that can infect, or from a prophage that is stably integrated into the genome of, Vibrio cholerae, a SSAP from a bacteriophage that can infect, or from a prophage that is stably integrated into the genome of, Helicobacter pullorum, and a SSAP from a bacteriophage that can infect, or from a prophage that is stably integrated into the genome of, Methyloversatilis universalis. In some embodiments, the SSAP from a bacteriophage that can infect, or from a prophage that is stably integrated into the genome of, Thalassomonas phage comprises the amino acid sequence of SEQ ID NO: 19, the SSAP from a bacteriophage that can infect, or from a prophage that is stably integrated into the genome of, Herbaspirillum sp. comprises the amino acid sequence of SEQ ID NO: 201, the SSAP from a bacteriophage that can infect, or from a prophage that is stably integrated into the genome of, Vibrio cholera comprises the amino acid sequence of SEQ ID NO: 63, the SSAP from a bacteriophage that can infect, or from a prophage that is stably integrated into the genome of, Helicobacter pullorum comprises the amino acid sequence of SEQ ID NO: 128, and the SSAP from a bacteriophage that can infect, or from a prophage that is stably integrated into the genome of, Methyloversatilis universalis comprises the amino acid sequence of SEQ ID NO: 210.

[0091] In some embodiments, the E. coli cell further comprises an exogenous nucleic acid comprising a sequence of interest. In some embodiments, the nucleic acid is integrated in the genome of the E. coli cell. In some embodiments, the nucleic acid is a single-stranded DNA. In some embodiments, the nucleic acid is a double-stranded DNA.

[0092] Also provided herein are methods comprising culturing the recombinant E. coli cell and producing a modified E. coli cell comprising the sequence of interest.

[0093] In other aspects, the present disclosure provides a recombinant Lactococcus lactis (L. lactis) cell comprising a single-stranded annealing protein (SSAP) from a bacteriophage that can infect, or from a prophage that is stably integrated into the genome of, Enterococcus faecalis and a single-stranded binding protein (SSB) selected from the group consisting of: a SSB from a bacteriophage that can infect, or from a prophage that is stably integrated into the genome of, Streptococcus sp., a SSB from a bacteriophage that can infect, or from a prophage that is stably integrated into the genome of, Lactobacillus sp., and a SSB from a bacteriophage that can infect, or from a prophage that is stably integrated into the genome of, Pseudomonas sp. In some embodiments, the SSAP from a bacteriophage that can infect, or from a prophage that is stably integrated into the genome of, Enterococcus faecalis comprises the amino acid sequence of SEQ ID NO: 5. In some embodiments, the SSB from a bacteriophage that can infect, or from a prophage that is stably integrated into the genome of, Streptococcus sp. comprises the amino acid sequence of SEQ ID NO: 366, the SSB from a bacteriophage that can infect, or from a prophage that is stably integrated into the genome of, Lactobacillus sp. comprises the amino acid sequence of SEQ ID NO: 381, and/or the SSB from a bacteriophage that can infect, or from a prophage that is stably integrated into the genome of, Pseudomonas sp. comprises the amino acid sequence of SEQ ID NO: 395.

[0094] In yet other aspects, the present disclosure provides a recombinant Lactococcus lactis (L. lactis) cell comprising a single-stranded annealing protein (SSAP) from a bacteriophage that can infect, or from a prophage that is stably integrated into the genome of, Clostridium sp. and a single-stranded binding protein (SSB) selected from the group consisting of: a SSB from a bacteriophage that can infect, or from a prophage that is stably integrated into the genome of, Escherichia coli, a SSB from a bacteriophage that can infect, or from a prophage that is stably integrated into the genome of, Haemophilus influenzae, a SSB from a bacteriophage that can infect, or from a prophage that is stably integrated into the genome of, Streptococcus sp., and a SSB from a bacteriophage that can infect, or from a prophage that is stably integrated into the genome of, Lactobacillus sp. In some embodiments, the SSAP from a bacteriophage that can infect, or from a prophage that is stably integrated into the genome of, Clostridium sp. comprises the amino acid sequence of SEQ ID NO: 143. In some embodiments, the SSB from a bacteriophage that can infect, or from a prophage that is stably integrated into the genome of, Escherichia coli comprises the amino acid sequence of SEQ ID NO: 262, the SSB from a bacteriophage that can infect, or from a prophage that is stably integrated into the genome of, Haemophilus influenza comprises the amino acid sequence of SEQ ID NO: 325, the SSB from a bacteriophage that can infect, or from a prophage that is stably integrated into the genome of, Streptococcus sp. comprises the amino acid sequence of SEQ ID NO: 366, and/or the SSB from a bacteriophage that can infect, or from a prophage that is stably integrated into the genome of, Lactobacillus sp. comprises the amino acid sequence of SEQ ID NO: 381.

[0095] In some embodiments, the L. lactis cell further comprises an exogenous nucleic acid comprising a sequence of interest. In some embodiments, the nucleic acid is integrated in the genome of the L. lactis cell. In some embodiments, the nucleic acid is a single-stranded DNA. In some embodiments, the nucleic acid is a double-stranded DNA.

[0096] Also provided herein are methods comprising culturing the recombinant L. lactis cell and producing a modified L. lactis cell comprising the sequence of interest.

[0097] In further aspects, the present disclosure provides a recombinant Mycobacterium smegmatis (M. smegmatis) cell comprising a single-stranded annealing protein (SSAP) selected from the group consisting of: a SSAP from a bacteriophage that can infect, or from a prophage that is stably integrated into the genome of, Clostridium sp., a SSAP from a bacteriophage that can infect, or from a prophage that is stably integrated into the genome of, Microbacterium ginsengisoli, a SSAP from a bacteriophage that can infect, or from a prophage that is stably integrated into the genome of, Streptomyces sp., and a SSAP from a bacteriophage that can infect, or from a prophage that is stably integrated into the genome of, Nocardia farcinica. In some embodiments, the SSAP from a bacteriophage that can infect, or from a prophage that is stably integrated into the genome of, Clostridium sp. comprises the amino acid sequence of SEQ ID NO: 143, the SSAP from a bacteriophage that can infect, or from a prophage that is stably integrated into the genome of, Microbacterium ginsengisoli comprises the amino acid sequence of SEQ ID NO: 178, the SSAP from a bacteriophage that can infect, or from a prophage that is stably integrated into the genome of, Streptomyces sp. comprises the amino acid sequence of SEQ ID NO: 140, and/or the SSAP from a bacteriophage that can infect, or from a prophage that is stably integrated into the genome of, Nocardia farcinica comprises the amino acid sequence of SEQ ID NO: 175.

[0098] In some embodiments, the M. smegmatis cell further comprises a single-stranded binding protein (SSB).

[0099] In some embodiments, the M. smegmatis cell further comprises an exogenous nucleic acid comprising a sequence of interest. In some embodiments, the nucleic acid is integrated in the genome of the M. smegmatis cell. In some embodiments, the nucleic acid is a single-stranded DNA. In some embodiments, the nucleic acid is a double-stranded DNA.

[0100] Also provided herein are methods comprising culturing the recombinant M. smegmatis cell and producing a modified M. smegmatis cell comprising the sequence of interest.

[0101] In additional aspects, the present disclosure provides a recombinant Escherichia coli (E. coli) cell comprising: a single-stranded annealing protein (SSAP) selected from a bacteriophage that can infect, or from a prophage that is stably integrated into the genome of, the group consisting of a SSAP from a bacteriophage that can infect, or from a prophage that is stably integrated into the genome of, Collinsella stercoris, a SSAP from a bacteriophage that can infect, or from a prophage that is stably integrated into the genome of, Thalassomonas sp., a SSAP from a bacteriophage that can infect, or from a prophage that is stably integrated into the genome of, Vibrio cholera, and a SSAP from a bacteriophage that can infect, or from a prophage that is stably integrated into the genome of, Helicobacter pullorum; and a single-stranded binding protein (SSB) selected from a bacteriophage that can infect, or from a prophage that is stably integrated into the genome of, the group consisting of a SSB from a bacteriophage that can infect, or from a prophage that is stably integrated into the genome of, Streptococcus pyogenes, a SSB from a bacteriophage that can infect, or from a prophage that is stably integrated into the genome of, Sodalis glossinidius, a SSB from a bacteriophage that can infect, or from a prophage that is stably integrated into the genome of, Clostridium botulinum, a SSB from a bacteriophage that can infect, or from a prophage that is stably integrated into the genome of, Salmonella sp., a SSB from a bacteriophage that can infect, or from a prophage that is stably integrated into the genome of, Gordonia soli, a SSB from a bacteriophage that can infect, or from a prophage that is stably integrated into the genome of, Paeniclostridium sordellii, and a SSB from a bacteriophage that can infect, or from a prophage that is stably integrated into the genome of, Staphylococcus aureus. In some embodiments, the SSAP from a bacteriophage that can infect, or from a prophage that is stably integrated into the genome of, Collinsella stercoris comprises the amino acid sequence of SEQ ID NO: 157, the SSAP from a bacteriophage that can infect, or from a prophage that is stably integrated into the genome of, Thalassomonas sp. comprises the amino acid sequence of SEQ ID NO: 19, the SSAP from a bacteriophage that can infect, or from a prophage that is stably integrated into the genome of, Vibrio cholera comprises the amino acid sequence of SEQ ID NO: 63, and/or the SSAP from a bacteriophage that can infect, or from a prophage that is stably integrated into the genome of, Helicobacter pullorum comprises the amino acid sequence of SEQ ID NO: 128; and/or the SSB from a bacteriophage that can infect, or from a prophage that is stably integrated into the genome of, Streptococcus pyogenes comprises the amino acid sequence of SEQ ID NO: 235, the SSB from a bacteriophage that can infect, or from a prophage that is stably integrated into the genome of, Sodalis glossinidius comprises the amino acid sequence of SEQ ID NO: 281, the SSB from a bacteriophage that can infect, or from a prophage that is stably integrated into the genome of, Clostridium botulinum comprises the amino acid sequence of SEQ ID NO: 300, the SSB from a bacteriophage that can infect, or from a prophage that is stably integrated into the genome of, Salmonella sp. comprises the amino acid sequence of SEQ ID NO: 308, the SSB from a bacteriophage that can infect, or from a prophage that is stably integrated into the genome of, Gordonia soli comprises the amino acid sequence of SEQ ID NO: 382, the SSB from a bacteriophage that can infect, or from a prophage that is stably integrated into the genome of, Paeniclostridium sordellii comprises the amino acid sequence of SEQ ID NO: 384, and/or the SSB from a bacteriophage that can infect, or from a prophage that is stably integrated into the genome of, Staphylococcus aureus comprises the amino acid sequence of SEQ ID NO: 460.

[0102] In additional aspects, the present disclosure provides a recombinant Lactococcus lactis (L. lactis) cell comprising: a single-stranded annealing protein (SSAP) selected from a bacteriophage that can infect, or from a prophage that is stably integrated into the genome of, the group consisting of a SSAP from a bacteriophage that can infect, or from a prophage that is stably integrated into the genome of, Enterococcus faecalis, a SSAP from a bacteriophage that can infect, or from a prophage that is stably integrated into the genome of, Agrobacterium rhizogenes, a SSAP from a bacteriophage that can infect, or from a prophage that is stably integrated into the genome of, Clostridium sp., and a SSAP from a bacteriophage that can infect, or from a prophage that is stably integrated into the genome of, Clostridium botulinum; and a single-stranded binding protein (SSB) selected from a bacteriophage that can infect, or from a prophage that is stably integrated into the genome of, the group consisting of a SSB from a bacteriophage that can infect, or from a prophage that is stably integrated into the genome of, Escherichia coli, a SSB from a bacteriophage that can infect, or from a prophage that is stably integrated into the genome of, Enterobacteria sp., a SSB from a bacteriophage that can infect, or from a prophage that is stably integrated into the genome of, Haemophilus influenza, a SSB from a bacteriophage that can infect, or from a prophage that is stably integrated into the genome of, Streptococcus, a SSB from a bacteriophage that can infect, or from a prophage that is stably integrated into the genome of, Desulfitobacterium metallireducens, a SSB from a bacteriophage that can infect, or from a prophage that is stably integrated into the genome of, Lactobacillus sp., and a SSB from a bacteriophage that can infect, or from a prophage that is stably integrated into the genome of, Pseudomonas sp. In some embodiments, the SSAP from a bacteriophage that can infect, or from a prophage that is stably integrated into the genome of, Enterococcus faecalis comprises the amino acid sequence of SEQ ID NO: 5, the SSAP from a bacteriophage that can infect, or from a prophage that is stably integrated into the genome of, Agrobacterium rhizogenes comprises the amino acid sequence of SEQ ID NO: 7, the SSAP from a bacteriophage that can infect, or from a prophage that is stably integrated into the genome of, Clostridium sp. comprises the amino acid sequence of SEQ ID NO: 143, and/or the SSAP from a bacteriophage that can infect, or from a prophage that is stably integrated into the genome of, Clostridium botulinum comprises the amino acid sequence of SEQ ID NO: 37; and/or the SSB from a bacteriophage that can infect, or from a prophage that is stably integrated into the genome of, Escherichia coli comprises the amino acid sequence of SEQ ID NO: 262, the SSB from a bacteriophage that can infect, or from a prophage that is stably integrated into the genome of, Enterobacteria sp. comprises the amino acid sequence of SEQ ID NO: 284, the SSB from a bacteriophage that can infect, or from a prophage that is stably integrated into the genome of, Haemophilus influenza comprises the amino acid sequence of SEQ ID NO: 325, the SSB from a bacteriophage that can infect, or from a prophage that is stably integrated into the genome of, Streptococcus comprises the amino acid sequence of SEQ ID NO: 366, the SSB from a bacteriophage that can infect, or from a prophage that is stably integrated into the genome of, Desulfitobacterium metallireducens comprises the amino acid sequence of SEQ ID NO: 368, the SSB from a bacteriophage that can infect, or from a prophage that is stably integrated into the genome of, Lactobacillus sp. comprises the amino acid sequence of SEQ ID NO: 381, and the SSB from a bacteriophage that can infect, or from a prophage that is stably integrated into the genome of, Pseudomonas sp. comprises the amino acid sequence of SEQ ID NO: 395.

### Additional Embodiments

[0103] Additional embodiments of the present disclosure are provided in the following numbered paragraphs:

[0104] Paragraph 1. A recombinant bacterial cell comprising a single-stranded annealing protein (SSAP) from a bacteriophage that can infect Collinsella stercoris, wherein the SSAP is expressed from a non-native promoter.

[0105] Paragraph 2. The recombinant bacterial cell of paragraph 1, wherein the recombinant bacterial cell is selected from the group consisting of a recombinant Escherichia coli cell, a recombinant Klebsiella pneumoniae cell, a recombinant Salmonella enterica cell, and a recombinant Citrobacter freundii cell.

[0106] Paragraph 3. A recombinant Escherichia coli (E. coli) cell comprising a single-stranded annealing protein (SSAP) from a bacteriophage that can infect Collinsella stercoris.

[0107] Paragraph 4. The recombinant E. coli cell of paragraph 3, wherein the SSAP comprises the amino acid sequence of SEQ ID NO: 157.

[0108] Paragraph 5. The recombinant E. coli cell of paragraph 3 or 4, wherein the cell further comprises a single-stranded binding protein (SSB).

[0109] Paragraph 6. The recombinant E. coli cell of paragraph 5, wherein the SSB is selected from the group consisting of: a SSB from a bacteriophage that can infect Clostridium botulinum, a SSB from a bacteriophage that can infect Gordonia soli, a SSB from a bacteriophage that can infect Paeniclostridium sordellii, and a SSB from a bacteriophage that can infect Enterococcus faecalis.

[0110] Paragraph 7. The recombinant E. coli cell of paragraph 6, wherein the SSB from a bacteriophage that can infect Clostridium botulinum comprises the amino acid sequence of SEQ ID NO: 300, the SSB from a bacteriophage that can infect Gordonia soli comprises the amino acid sequence of SEQ ID NO: 382, the SSB from a bacteriophage that can infect Paeniclostridium sordellii comprises the amino acid sequence of SEQ ID NO: 384, and/or the SSB from a bacteriophage that can infect Enterococcus faecalis comprises the amino acid sequence of SEQ ID NO: 389.

[0111] Paragraph 8. The recombinant E. coli cell of paragraph 6, wherein the SSB is from a bacteriophage that can infect Gordonia soli, optionally comprising the amino acid sequence of SEQ ID NO: 382.

[0112] Paragraph 9. The recombinant E. coli cell of paragraph 6, wherein the SSB is from a bacteriophage that can infect Paeniclostridium sordellii, optionally comprising the amino acid sequence of SEQ ID NO: 384.

[0113] Paragraph 10. A method, comprising

[0114] culturing a recombinant Escherichia coli (E. coli) cell that comprises (a) a single-stranded annealing protein (SSAP) from a bacteriophage that can infect Collinsella stercoris and (b) a nucleic acid comprising a sequence of interest that binds to a target locus of the E. coli cell genome, wherein the sequence of interest comprises a nucleotide modification relative to the target locus, and

[0115] producing a modified E. coli cell comprising the sequence of interest at the target locus.

[0116] Paragraph 11. The method of paragraph 10, wherein the modification is a mutation, insertion, and/or deletion.

[0117] Paragraph 12. A recombinant Lactococcus lactis (L. lactis) cell comprising a single-stranded annealing protein (SSAP) from a bacteriophage that can infect Enterococcus faecalis.

[0118] Paragraph 13. The recombinant L. lactis cell of paragraph 12, wherein the SSAP comprises the amino acid sequence of SEQ ID NO: 5.

[0119] Paragraph 14. A recombinant Lactococcus lactis (L. lactis) cell comprising a single-stranded annealing protein (SSAP) from a bacteriophage that can infect Clostridium sp.

[0120] Paragraph 15. The recombinant L. lactis cell of paragraph 14, wherein the SSAP comprises the amino acid sequence of SEQ ID NO: 143.

[0121] Paragraph 16. The recombinant L. lactis cell of any one of paragraphs 12-15, wherein the cell further comprises a single-stranded binding protein (SSB).

[0122] Paragraph 17. The recombinant L. lactis cell of paragraph 16, wherein the SSB is from a bacteriophage that can infect Streptococcus sp.

[0123] Paragraph 18. The L. lactis cell of paragraph 17, wherein the SSB comprises the amino acid sequence of SEQ ID NO: 366.

[0124] Paragraph 19. A method, comprising

[0125] culturing a recombinant Lactococcus lactis (L. lactis) cell comprising a single-stranded annealing protein (SSAP) from a bacteriophage that can infect Enterococcus faecalis and (b) an nucleic acid comprising a sequence of interest that binds to a target locus of the L. lactis cell genome, wherein the sequence of interest comprises a nucleotide modification relative to the target locus, and

[0126] producing a modified L. lactis cell comprising the sequence of interest at the target locus.

[0127] Paragraph 20. A method, comprising

[0128] culturing a recombinant Lactococcus lactis (L. lactis) cell comprising a single-stranded annealing protein (SSAP) from a bacteriophage that can infect Clostridium sp. and (b) an nucleic acid comprising a sequence of interest that binds to a target locus of the L. lactis cell genome, wherein the sequence of interest comprises a nucleotide modification relative to the target locus, and

[0129] producing a modified L. lactis cell comprising the sequence of interest at the target locus.

[0130] Paragraph 21. A recombinant Mycobacterium smegmatis (M. smegmatis) cell comprising a single-stranded annealing protein (SSAP) from a bacteriophage that can infect Legionella pneumophila.

[0131] Paragraph 22. The recombinant M. smegmatis cell of paragraph 21, wherein the SSAP comprises the amino acid sequence of SEQ ID NO: 44.

[0132] Paragraph 23. The recombinant M. smegmatis cell of paragraph 21 or 22, wherein the cell further comprises a single-stranded binding protein (SSB).

[0133] Paragraph 24. A method, comprising

[0134] culturing a recombinant Mycobacterium smegmatis (M. smegmatis) cell comprising a single-stranded annealing protein (SSAP) from a bacteriophage that can infect Legionella pneumophila and (b) an nucleic acid comprising a sequence of interest that binds to a target locus of the M. smegmatis cell genome, wherein the sequence of interest comprises a nucleotide modification relative to the target locus, and

[0135] producing a modified M. smegmatis cell comprising the sequence of interest at the target locus.

[0136] Paragraph 25. The recombinant cell of any one of the foregoing paragraphs, wherein the cell further comprises an exogenous nucleic acid comprising a sequence of interest that binds to a target locus of the cell genome, wherein the sequence of interest comprises a nucleotide modification relative to the target locus.

[0137] Paragraph 26. The recombinant cell of paragraph 25, wherein the nucleic acid is a single-stranded DNA.

[0138] Paragraph 27. The recombinant cell of paragraph 25, wherein the nucleic acid is a double-stranded DNA.

[0139] Paragraph 28. The recombinant cell of any one of paragraphs 25-27, wherein the nucleic acid is integrated in the genome of the cell.

[0140] Paragraph 29. A method, comprising

[0141] culturing the recombinant cell of any one of paragraphs 25-27 and producing a modified cell comprising the sequence of interest at the target locus.

[0142] Paragraph 30. A method of editing the genome of Escherichia coli (E. coli) cells, comprising

[0143] performing multiplexed automatable genome engineering (MAGE) in E. coli cells that comprise (a) a single-stranded annealing protein (SSAP) from a bacteriophage that can infect Collinsella stercoris and (b) at least two exogenous nucleic acids, each comprising a sequence of interest that binds to at least one target locus of the E. coli cell genome, wherein the sequence of interest comprises a nucleotide modification relative to the target locus, and

[0144] producing modified E. coli cells comprising the sequence of interest at the target locus.

[0145] Paragraph 31. The method of paragraph 30, wherein the SSAP comprises the amino acid sequence of SEQ ID NO: 157.

[0146] Paragraph 32. The method of paragraph 30 or 31, wherein at least 50% of the cells comprise the sequence of interest, optionally following 5-10 cycles of MAGE.

[0147] Paragraph 33. The method of paragraph 30 or 31, wherein the E. coli cells further comprise a single-stranded binding protein (SSB) from a bacteriophage that can infect Paeniclostridium sordellii.

[0148] Paragraph 34. The method of paragraph 33, wherein the SSB comprises the amino acid sequence of SEQ ID NO: 384.

[0149] Paragraph 35. The method of paragraph 33 or 34, wherein at least 50% of the cells comprise the sequence of interest, optionally following 5-10 cycles of MAGE.

[0150] Paragraph 36. The method of paragraph 35, wherein at least 75% of the cells comprise the sequence of interest, optionally following 5-10 cycles of MAGE.

[0151] Paragraph 37. A recombinant bacterial cell comprising a single-stranded annealing protein (SSAP) from a bacteriophage that can infect Pseudomonas aeruginosa, wherein the SSAP is expressed from a non-native promoter.

[0152] Paragraph 38. The recombinant bacterial cell of paragraph 37, wherein the SSAP comprises the amino acid sequence of SEQ ID NO: 24.

[0153] Paragraph 39. The recombinant bacterial cell of paragraph 37 or 38, wherein the recombinant bacterial cell is selected from the group consisting of a recombinant Klebsiella pneumoniae cell, a recombinant Salmonella enterica cell, and a recombinant Citrobacter freundii cell.

[0154] Paragraph 40. The recombinant bacterial cell of any one of paragraphs 37-39, wherein the cell further comprises a single-stranded binding protein (SSB).

[0155] Paragraph 41. The recombinant bacterial cell of any one of paragraphs 37-40, wherein the cell further comprises an exogenous nucleic acid comprising a sequence of interest that binds to a target locus of the cell genome, wherein the sequence of interest comprises a nucleotide modification relative to the target locus.

[0156] Paragraph 42. The recombinant bacterial cell of paragraph 41, wherein the nucleic acid is a single-stranded DNA.

[0157] Paragraph 43. The recombinant bacterial cell of paragraph 41, wherein the nucleic acid is a double-stranded DNA.

[0158] Paragraph 44. The recombinant bacterial cell of any one of paragraphs 41-43, wherein the nucleic acid is integrated in the genome of the cell.

[0159] Paragraph 45. A method, comprising culturing the cell of any one of paragraphs 41-43 and producing a modified cell comprising the sequence of interest at the target locus.

[0160] Paragraph 46. A recombinant bacterial cell comprising a single-stranded annealing protein (SSAP) and/or a single-stranded binding protein (SSB) of Table 1 expressed from a non-native promoter.

[0161] Paragraph 47. The recombinant bacterial cell of paragraph 46, wherein the cell further comprises an exogenous nucleic acid comprising a sequence of interest that binds to a target locus of the cell genome, wherein the sequence of interest comprises a nucleotide modification relative to the target locus.

[0162] Paragraph 48. The recombinant bacterial cell of paragraph 47, wherein the nucleic acid is a single-stranded DNA.

[0163] Paragraph 49. The recombinant bacterial cell of paragraph 47, wherein the nucleic acid is a double-stranded DNA.

[0164] Paragraph 50. The recombinant bacterial cell of any one of paragraphs 47-49, wherein the nucleic acid is integrated in the genome of the cell.

[0165] Paragraph 51. A method, comprising

[0166] culturing the recombinant bacterial cell of any one of paragraphs 47-49 and producing a modified bacterial cell comprising the sequence of interest at the target locus.

[0167] Paragraph 52. A method, comprising

[0168] (i) introducing into a recombinant cell: (a) a single-stranded annealing protein (SSAP), (b) a single-stranded binding protein (SSB), and (c) a double-stranded nucleic acid comprising a sequence of interest that binds to a genomic target locus of the recombinant cell, wherein the sequence of interest comprises a nucleotide modification relative to the target locus, and

[0169] (ii) producing a modified recombinant cell comprising the sequence of interest at the target locus, wherein the modified recombinant cell does not express an exogenous exonuclease.

[0170] Paragraph 53. The method of paragraph 52, wherein (a) and (b) are from the same species.

[0171] Paragraph 54. The method of paragraph 52, wherein (a) and (b) are from different species.

[0172] Paragraph 55. The method of any one of paragraphs 52-54, wherein the SSAP comprises SEQ ID NO: 24.

[0173] Paragraph 56. The method of any one of paragraphs 52-55, wherein the SSB comprises SEQ ID NO: 472.

[0174] Paragraph 57. The method of paragraph 36, wherein at least 95% of the cells comprise the sequence of interest following 15 cycles of MAGE.

[0175] Paragraph 58. The method of paragraph 36, wherein following 15 cycles of MAGE, the percentage of cells comprising the sequence of interest is at least four-fold greater as compared to control E. coli cells that comprise (a) a Redβ SSAP from Enterobacteria phage λ (SEQ ID NO: 474) and (b) the at least two exogenous nucleic acids, each comprising the sequence of interest that binds to a different target locus of the control E. coli cell genome, wherein the sequence of interest comprises the nucleotide modification relative to the target locus.

### EXAMPLES

### Example 1

[0176] A library of 234 SSAPs were tested both individually and co-expressed with a library of 237 SSBs (Table 1, below). In the SSAP/SSB library, SSAPs and SSBs were both individually enriched, so matrices to test all combinations of the top seven enriched SSBs against the top four enriched SSAPs in E. coli and L. lactis were constructed (FIGS. 1A-1B). The experiment was carried out in a 96-well electroporation set-up. The relative efficiencies are clearly discernable.

[0177] Top-performing SSAPs and SSAP/SSB pairs from experiments in E. coli, L. lactis, and M. smegmatis are shown in FIG. 2A, FIG. 2B and FIG. 2C, respectively. Bars in red are the proteins that had previously been reported in the literature. The proteins listed were found after ten rounds of selection for protein variants that enabled the introduction of an oligonucleotide that conferred a genomic edit that provided antibiotic resistance. Unbiased editing efficiency was tested in each case by introducing a non-coding base change at a non-essential gene and measuring the frequency of incorporation via next generation sequencing.

### Example 2

[0178] E. coli populations expressing either an efficient SSAP (SEQ ID NO: 157), an efficient SSAP/SSB pair (SEQ ID NO: 157/SEQ ID NO: 384), or the widely-used Redβ were taken through fifteen cycles of MAGE and transformed each cycle with a 10 μM pool comprising 15 unique oligos. Editing efficiency at each targeted locus was measured by NGS and averaged (FIG. 3).

[0179] The results showed the high-efficiency of SEQ ID NO: 157/SEQ ID NO: 384 for gene editing. This pair incorporated at close to 100% efficiency 15 separate mutations in one week, as compared to Redβ, which in the same time incorporated only at ˜20% efficiency.

### Example 3

[0180] The efficiency of genome-editing was tested in species that had not been tested in the previously-mentioned libraries. SSAP SEQ ID NO: 24, a high-efficiency SSAP from Pseudomonas aeruginoas (P. aeruginosa) was identified by an early experiment in E. coli. This protein displayed improved annealing kinetics in vitro (FIG. 4A). It showed improved efficiency over Redβ in many clinically relevant species of Gammaproteobacteria (FIG. 4B). In P. aeruginosa, it enabled rapid multi-drug resistance profiling (FIG. 4C). Four oligonucleotides were incorporated in one day and two cycles of MAGE, conferring resistance to three antibiotics at once.

[0181] SSAP SEQ ID NO: 24 has not previously been described, and it displayed high activity in many clinically relevant Gammaproteobacteria. Pseudomonas aeruginosa, Klebsiella pneumoniae, and Salmonella enterica were all chosen for their clinical relevance. Human infections of these bugs can acquire multi-drug resistance, becoming super-bugs. A gene-editing tool such as MAGE facilitates study of resistance trajectories.

### Example 4

[0182] Top individual SSAPs (SEQ ID NO: 157 and SEQ ID NO: 24, using Redβ as a control) were expressed in E. coli from a lambda pL promoter. The mutational profile of edits are shown in FIG. 5, including the efficiency of introducing 18-nucleotide (NT) and 30-NT mismatches. Efficiency was measured by disruption of LacZ, plating on X-gal, and counting the number of blue vs. white colonies. In contrast to FIG. 1A, a high over-performance by the SSAP (SEQ ID NO: 157) alone was observed when it was driven off of a more efficient promoter. It performed at about double the efficiency of Redβ or SSAP SEQ ID NO: 24.

[0183] Co-expression of an SSAP/SSB pair facilitated the integration of double-stranded cassettes. Erythromycin colony forming units (CFUs) were tested after expression of SSAP SEQ ID NO: 24 alone, or co-expressed with its corresponding SSB or exonuclease (FIG. 6A). The SSAP/SSB pair alone was enough for cassette insertion. EcSSAP (Redβ), performed slightly better with its associated exonuclease, but the SSAP/SSB pair alone performed nearly as well (FIG. 6B). These results show co-expression of an SSAP and SSB together can not only facilitate oligo-mediated cloning, but can improve the efficiency of double-stranded cassette integration.

[0184] The PaSSB used in this example is encoded by the following nucleic acid sequence.

(SEQ ID NO: 475)
ATGGCCCGTGGAGTGAACAAAGTAATTCTTGTCGGTAATGTGGGTGGGGA
TCCAGAGACGCGATACATGCCAAACGGGAACGCCGTGACAAATATCACCT
TAGCCACGAGCGAATCTTGGAAGGACAAACAAACAGGTCAGCAACAAGAA
CGAACCGAATGGCATAGAGTTGTATTTTTTGGCCGACTTGCTGAGATCGC
GGGTGAGTACCTTAGAAAGGGTTCTCAGGTTTATGTCGAGGGCTCATTAA
GAACACGTAAGTGGCAGGGGCAGGACGGGCAAGACCGATATACAACTGAA
ATAGTAGTGGACATAAACGGCAACATGCAACTTCTTGGTGGCAGACCGAG
TGGGGACGATTCACAGAGAGCTCCAAGAGAACCTATGCAGCGACCACAGC
AGGCTCCTCAACAGCAGTCTCGTCCGGCCCCTCAGCAGCAACCGGCTCCG
CAACCTGCACAAGATTACGATAGTTTTGATGATGATATTCCATTCTAA.

### Example 5

[0185] A library of the most broadly-acting three (3) SSAPs and twenty five (25) SSBs was cloned into an Agrobacterium tumefaciens (A. tumefaciens) vector (75-member library). The library was selected for efficient genome editing, and oligo-recombineering. Efficiency was measured from the two most frequent members of the library after two rounds of selection. Editing efficiency of close to 1% was measured in SSAP SEQ ID NO: 143/SSB SEQ ID NO: 310. The results demonstrate that a relatively small library of broadly acting SSAP/SSB pairs can produce active variants in a novel bacterial species. A. tumefaciens is quite distantly related to E. coli, L. lactis, and M. smegmatis (FIG. 7).

### Example 6

[0186] By investigating the distribution of efficient recombineering-functions across the seven principal families of phage-derived SSAPs, the initial SEER screen suggested the RecT family (Pfam family: PF03837) as the most abundant source of recombineering proteins for E. coli. Therefore, it was determined whether by screening additional RecT variants, again exploiting the increased throughput of SEER compared to previous efforts, one might discover recombineering proteins further improved over Redβ and PapRecT. To this aim a second library was constructed, identifying a maximally diverse group of 109 RecT variants, 106 of which were synthesized successfully, which was called Broad RecT Library (see Methods for more details). Next, as previously described, 10 rounds of SEER selection was performed on Broad RecT Library (FIGS. 8A-8B), and upon plotting frequency against enrichment after the final selection, a clear winner emerged (FIG. 9A). This protein, which was referred to as CspRecT (UniParc ID: UPI0001837D7F), originates from a phage of the Gram-positive bacterium Collinsella stercoris.

[0187] To maximize the phylogenetic reach and applicability of these new tools, CspRecT was characterized, alongside Redβ and PapRecT, subcloned into the pORTMAGE plasmid system (FIGS. 10A-10B, Addgene accession: #120418). This plasmid contains a broad-host RSF1010 origin of replication, establishes tight regulation of protein expression with an m-toluic-acid inducible expression system, and disables MMR by transient overexpression of a dominant-negative mutant of E. coli MutL (MutL E32K) (Nyerges et al., Proc. Natl. Acad. Sci. U.S.A. 113, 2502-2507 (2016)), which makes it possible to establish high-efficiency editing without modification of the host genome. Measured with a standard lacZ recombineering assay, wild-type E. coli MG1655 expressing CspRecT exhibited editing efficiency of 35-51% for various single-base mismatches, averaging 43% or more than double the efficiency of cells expressing Redβ or PapRecT off of the same plasmid system (FIG. 9B). This pORTMAGE plasmid expressing CspRecT was referred to as pORTMAGE-Ec1 (Addgene). Without being bound by a particular theory, the efficiency of CspRecT single-locus genome editing reported here is the first to significantly exceed 25%, the theoretical maximum for a single incorporation event (Pines et al., ACS Synth. Biol. 4, 1176-1185 (2015)), implying that editing occurs either at multiple forks or over successive rounds of genome replication.

[0188] CspRecT was then tested at a variety of more complex genome editing tasks. For longer strings of consecutive mismatches, which are lower efficiency events, CspRecT was again about twice as efficient as Redβ. Wild type E. coli MG1655 expressing CspRecT displayed 6% or 3% efficiency (vs. 3% or 1% for Redβ) for the insertion of oligos conferring 18-bp or 30-bp consecutive mismatches into the lacZ locus respectively (FIG. 9C). To further investigate the performance of CspRecT at complex, highly multiplexed genome editing tasks, a set of 20 oligos spaced evenly around the E. coli genome was designed, each of which incorporates a single-nucleotide synonymous mutation at a non-essential gene. Next, while expressing Redβ, PapRecT, and CspRecT separately from the corresponding pORTMAGE plasmid, a single cycle of genome editing was performed with equimolar pools of 1, 5, 10, 15, and 20 oligos and assayed editing efficiency at each locus by PCR amplification coupled to targeted next generation sequencing (NGS). NGS analysis revealed a general trend: as the number of parallel edits grew, the degree of overperformance by CspRecT also grew (FIG. 9D). For instance, when making 19 simultaneous edits (one oligo from the pool of 20 could not be read out due to inconsistencies in allelic amplification), CspRecT averaged 5.1% editing efficiency at all loci, whereas Redβ and PapRecT averaged only 0.40% and 0.43%. Importantly, despite keeping total oligo concentration fixed across all pools, aggregate editing efficiency increased as more oligos were present in each pool. For instance, when using CspRecT with a 19-oligo pool, aggregate editing efficiency was nearly 100%, implying that across the total recovered population of E. coli there averaged one edit per cell.

Finally, based on the increased integration efficiency with CspRecT in multiplexed genome editing tasks, its performance was also tested in a directed evolution with random genomic mutations (DIvERGE) experiment (Nyerges et al., Proc. Natl. Acad. Sci. U.S.A. 115, E5726-E5735 (2018)). DIvERGE uses large libraries of soft-randomized oligos that have a low basal error rate at each nucleotide position along their entire sequence to incorporate mutational diversity into a targeted genomic locus. To compare the performance of Redβ, PapRecT, and CspRecT, one round of DIvERGE mutagenesis was performed by simultaneously delivering 130 partially overlapping DIvERGE oligos designed to randomize all four protein subunits of the drug targets of ciprofloxacin (gyrA, gyrB, parC, and parE) in E. coli MG1655. Following library generation, cells were subjected to 250, 500, and 1,000 ng/mL ciprofloxacin (CIP) on LB-agar plates. Variant libraries that were generated by expressing CspRecT produced more than ten times as many colonies at low CIP concentrations (i.e., 250 ng/mL) as Redβ and PapRecT, while at 1,000 ng/mL CIP, which requires the simultaneous acquisition of at least two mutations (usually at gyrA and parC) to confer a resistant phenotype, only the use of CspRecT produced resistant variants (FIG. 9E). Because gyrA and parC mutations are usually necessary to confer high-level CIP resistance, sequence analysis of gyrA and parC from 11 randomly selected CIP-resistant colonies, many different mutations were found, in combinations of up to three (data not shown). In sum, in both MAGE and DIvERGE experiments, which require multiplex editing, CspRecT provided more than an order of magnitude improvement to editing efficiency over Redβ, the current state-of-the-art recombineering tool.

### Example 7

[0189] SSAPs frequently show host tropism (Sun et al., Appl. Microbiol. Biotechnol. 99, 5151-5162 (2015); Yin et al., iScience 14, 1-14 (2019); Ricaurte et al., Microb. Biotechnol. 11, 176-188 (2018)), but there are also indications that within bacterial clades certain SSAPs may function broadly (van Pijkeren et al., Nucleic Acids Res. 40, e76 (2012); Nyerges et al., Proc. Natl. Acad. Sci. U.S.A. 113, 2502-2507 (2016); van Kessel et al., Nat. Rev. Microbiol. 6, 851-857 (2008)). Therefore, the functionality of PapRecT and CspRecT in selected Gammaproteobacteria was investigated and their efficiency was compared to that of Redβ. Efforts were focused on two enterobacterial species: Citrobacter freundii ATCC 8090 and Klebsiella pneumoniae ATCC 10031, along with the more distantly related Pseudomonas aeruginosa PAO1. Pathogenic isolates of K. pneumoniae and P. aeruginosa are among the most concerning clinical threats due to widespread multidrug resistance (Tommasi et al., Nat. Rev. Drug Discov. 14, 529-542 (2015)). In these species, oligo-recombineering based multiplexed genome editing (i.e., MAGE and DIvERGE) holds the promise of enabling rapid analysis of genotype-to-phenotype relationships and predicting future mechanisms of antimicrobial resistance (Nyerges et al., Proc. Natl. Acad. Sci. U.S.A. 115, E5726-E5735 (2018); Szili et al., bioRxiv 495630 (2018) doi:10.1101/495630. C. freundii, by contrast, is an intriguing biomanufacturing host in which the optimization of metabolic pathways has remained challenging (Yang et al., Biochem. Eng. J. 57, 55-62 (2011); Jiang et al., Appl. Microbiol. Biotechnol. 94, 1521-1532 (2012)).

[0190] To test the activity of PapRecT and CspRecT in these three organisms, the broad-host-range pORTMAGE system (Nyerges et al., Proc. Natl. Acad. Sci. U.S.A. 113, 2502-2507 (2016)) was built on as described above. For experiments in E. coli PapRecT or CspRecT was subcloned in place of Redβ into pORTMAGE311B (Szili et al., Antimicrob. Agents Chemother. AAC.00207-19 (2019) doi:10.1128/AAC.00207-19) (FIGS. 10A-10B; Addgene accession: #120418), which transiently disrupts MMR with EcMutL_E32K, and whose RSF1010 origin of replication and m-toluic-acid-based expression system allows the plasmid to be deployed over a broad range of bacterial hosts (Honda et al., Proc. Natl. Acad. Sci. U.S.A. 88, 179-183 (1991); Gawin et al., Microb. Biotechnol. 10, 702 (2017)). These same pORTMAGE-based constructs were used for testing in C. freundii and K. pneumoniae. In P. aeruginosa the plasmid architecture remained constant, except that the origin of replication and antibiotic resistance were replaced, instead using the broad-host-range pBBR1 origin, which was shown to replicate in P. aeruginosa (Szpirer et al., J. Bacteriol. 183, 2101-2110 (2001)), and a gentamicin resistance marker (FIGS. 10A-10B). Next these constructs were tested (See methods for details), and in all three species, PapRecT and CspRecT displayed high editing efficiencies (FIG. 11A). In C. freundii and K. pneumoniae, just as in E. coli, CspRecT was found to be the optimal choice of protein, whereas in P. aeruginosa PapRecT performed the best. PapRecT was further compared to two recently reported Pseudomonas putida SSAPs (Rec2 and Ssr) (Ricaurte et al., Microb. Biotechnol. 11, 176-188 (2018); Aparicio et al., Microb. Biotechnol. 11, 176-188 (2018)), and found that PapRecT, isolated from a large E. coli screen performed equal to or better than proteins found in smaller screens run through P. putida (FIG. 12). It was found, however, that the efficiency of the plasmid construct was lower in P. aeruginosa than in the enterobacterial species that pORTMAGE was optimized for. Therefore, to increase editing efficiency in P. aeruginosa, i.) ribosomal binding sites (RBS) for PapRecT and EcMutL were optimized, ii.) EcMutL_E32K was replaced with its equivalent homologous mutant from P. aeruginosa (PaMutL_E36K), iii.) the native P. aeruginosa coding sequence for PapRecT was incorporated instead of the E. coli codon-optimized version (FIG. 13). Together these changes significantly improved the editing efficiency of the best plasmid construct featuring PapRecT in P. aeruginosa, which was called pORTMAGE-Pa1 (Addgene), to −15%.

[0191] Virulent strains of P. aeruginosa are a frequent cause of acute infections in healthy individuals, as well as chronic infections in high-risk patients, such as those suffering from cystic fibrosis (Marvig et al., Nat. Genet. 47, 57-64 (2015)). The rate of antibiotic resistance in this species is growing, with strains adapting quickly to all clinically applied antibiotics (AbdulWahab et al., Lung India Off. Organ Indian Chest Soc. 34, 527-531 (2017); Tacconelli et al., Lancet Infect. Dis. 18, 318-327 (2018)). The development of multidrug resistance in P. aeruginosa requires the successive acquisition of multiple mutations, but due to the lack of efficient tools for multiplex genome engineering in P. aeruginosa (Agnello et al., J. Microbiol. Methods 98, 23-25 (2014); Chen et al., iScience 6, 222-231 (2018)), investigation of these evolutionary trajectories has remained cumbersome. Therefore, and to demonstrate the utility of pORTMAGE-Pa1-based MAGE in P. aeruginosa, a panel of genomic mutations that individually confer resistance to STR, RIF, and fluoroquinolones (i.e., CIP) were simultaneously incorporated (Cabot et al., Antimicrob. Agents Chemother. 60, 1767-1778 (2016); Jatsenko et al., Mutat. Res. 683, 106-114 (2010)). Importantly, the corresponding genes are also clinical antibiotic targets in P. aeruginosa (PEW ChariTable Trust. Antibiotics Currently in Global Clinical Development; pew.org/1YkUFkT). Following a single cycle of MAGE delivering 5 mutation-carrying oligos, a single-day experiment with pORTMAGE-Pa1, all possible combinations of five resistant mutations were able to be isolated, with more than 10⁵ cells from a 1 ml overnight recovery attaining simultaneous resistance to STR, RIF, and CIP (FIG. 11B). Interestingly, because rpsL and rpoB, the resistant loci for STR and RIF respectively, are located only ˜5 kb apart from each other on the P. aeruginosa genome, these two mutations co-segregated much more often than would be expected by independent inheritance, confirming that co-selection functions similarly in P. aeruginosa to E. coli (FIG. 11C) (Wang et al., Nat. Methods 9, 591-593 (2012)). By genotyping and characterizing resistant colonies, the Minimum Inhibitory Concentration (MIC) of CIP for various resistant genotypes could be determined (Table 2, FIG. 14). GyrA_T83I displays strong positive epistasis with ParC_S87L, and so clonal populations with mutations to parC but not gyrA were not pulled out of the antibiotic selection (Marcusson et al., PLoS Pathog. 5, e1000541 (2009)). The allure of this method is that the entire workflow took only three days to complete, in contrast with other genome engineering methods (i.e., CRISPR/Cas9 or base-editor-based strategies) that are either less effective, have biased mutational spectra, and/or would require tedious plasmid cloning and cell manipulation steps (Agnello et al., J. Microbiol. Methods 98, 23-25 (2014); Chen et al., iScience 6, 222-231 (2018)).

### Example 8

[0192] The performance of Redβ expressed off of its wild-type codons against the codon-optimized version that was included in Broad SSAP Library. This revealed significantly decreased efficiency for the codon-optimized version of Redβ (FIG. 15), which indicates that codon choice is an important consideration for library design.

### Example 9

[0193] A set of five Broad SSAP library members that exhibited both high frequency and enrichment were chosen for further analysis. Their recombineering efficiency was tested against Redβ expressed off of its wild-type codons on the same plasmid system used for the SEER selections. To ensure an accurate measurement the efficiency of each SSAP was queried by NGS after performing a silent, non-coding genetic mutation at a non-essential gene, ynfF (silent mismatch MAGE oligo). Broad SSAP Library member: SR016, noted above as PapRecT (UniParc ID: UPI0001E9E6CB), demonstrated the highest efficiency of recombineering among the five Broad SSAP candidates, i.e. 31%±2% (FIG. 16A). The impact of these SSAPs on growth rate is shown in FIG. 16B.

[0194] See also, e.g., Wannier et al., bioRxiv 2020.01.14.906594 (doi.org/10.1101/2020.01.14.906594), which is incorporated by reference in its entirety.

TABLE 1
SSAP and SSB_Library

| | | | | | SEQ |
|---|---|---|---|---|---|
| | | | | | ID |
| Protein | Type | Family | Source | Amino Acid Sequence | NO: |
| N001 | SSAP | recT | Lactobacillus reuteri | MTNQVAQQQKPTKLTDLVLDRVKQMQDTQDLSPKNYNASN | 1 |
| | | | | ALNAAFLELQKVQDRNHRPALEVCSHDSIVKSLLDMTLQGLSP | |
| | | | | AKDQCYFIVYGNELQMQRSYFGTVAAVKRLDGVKKVRAEVV | |
| | | | | HEKDDFEIGANEDMELVVKRFVPKFENQDNQIIGAFAMIKTDE | |
| | | | | GTDFTVMTKKEIDQSWAQTRQKNNKVQQNESQEMAKRTVEN | |
| | | | | RAAKMFINTSDDSDLLTGAINDTTSNEYDDERRDVTPVEDEKQ | |
| | | | | STDKLLEGFQKSQEAKAKGVSNDGNSNEGKETSEEVADGQTE | |
| | | | | LFSEGTIKPADEADS | |
| N002 | SSAP | recT | Lactobacillus reuteri | MTNQVANTQQITVKQFVNMNSTKKRFEDVLGKRAPQFMSSLIS | 2 |
| | | | | IVNSDQNLQRVEAASVINSALVAAALDLPINPNFGYMYIVPYN | |
| | | | | GQAQPQMGYKGYIQLAQRSGQYRKITVAELYEDEFISWDPLM | |
| | | | | EELKYEAHREKERDEKEQPVGYFGHFELLNGFQKTVYWTRQQ | |
| | | | | VDNRRKRFSQAGGKNSDKPKGVWAKNYNAMALKTVIKDLLT | |
| | | | | KWGPMTVDMQTAYGADEEEYNENPRDVTPVQDTASAQSEEG | |
| | | | | YQTQDILNSFDQAEKEKASKEEAKPAKKATKTAKKTVKKGDE | |
| | | | | VNNANESQEELFPDGTITPHAK | |
| N003 | SSAP | recT | Escherichia coli | MTKQPPIAKADLQKTQGNRAPAAVKNSDVISFINQPSMKEQLA | 3 |
| | | | | AALPRHMTAERMIRIATTEIRKVPALGNCDTMSFVSAIVQCSQL | |
| | | | | GLEPGSALGHAYLLPFGNKNEKSGKKNVQLIIGYRGMIDLARR | |
| | | | | SGQIASLSARVVREGDEFSFEFGLDEKLIHRPGENEDAPVTHVY | |
| | | | | AVARLKDGGTQFEVMTRKQIELVRSLSKAGNNGPWVTHWEE | |
| | | | | MAKKTAIRRLFKYLPVSIEIQRAVSMDEKEPLTIDPADSSVLTGE | |
| | | | | YSVIDNSEE | |
| N004 | SSAP | recT | Enterococcus faecalis (strain | MSNDLTQITQRSLDEQVIGNLNRLQEQGLEMPPGYSPQNALKS | 4 |
| | | | ATCC 700802/V583) | AFFELTNNSGGNLLQLAANNPETKTSISNALLDMVIQGLSPAKK | |
| | | | | QCYFIKYGNKVQLMRSVFGTMAVLDRVTGGADITPVVVREGD | |
| | | | | VFEIAMDGPDLVVAKHETAFENLDNDIKAAYVVIKLANGKEVT | |
| | | | | TVMTKKQIDKSWSKAKTKNVQNDFPEEMAKRTVINRAAKYLI | |
| | | | | NTSNDNDLFVQAAKDTLENEFERKDVTPEREEQAAVLEEKLFS | |
| | | | | NNIKAVDQENENERITRVADVPEQPDIEQAKPIEKDNLTKVAD | |
| | | | | QILEEPVQETLDVMAGYETNQKESEADVSTIEEDDYPF | |
| N005 | SSAP | recT | Enterococcus faecalis TX0027 | MGNELIVSVQNRIQEMQHGEGLRLPTGYSVGNALNSAYLILSD | 5 |
| | | | | NSKGKSLLEKCHPTSVSKALLNMAIQGLSPAKNQCYFVPYGDQ | |
| | | | | CTLMRSYFGSVSILERLSNVKKVHAEVIFEGDEFEIGSEDGRTV | |
| | | | | VTNFKPSFLNRDNPIIGAFAWVEQTDGIKVYTIMTKKEIDKSWS | |
| | | | | KAKTKNVQNDYPQEMAKRTVLSRAAKMFINSSSDNDLLVKAI | |
| | | | | NETTEDEYDNNQQRKDITPNPPNIEKLEKSIFNQDENKKIAQDM | |
| | | | | IDSIDLNQADKDLQEELNIEFPDPSKNYLATGEVNGDVENEDGP | |
| | | | | YPF | |
| N006 | SSAP | recT | Bacillus subtilis | MAKNDDIRNQLANKVNSVQKEDKPKTLADYLNDMKPELQKALP | 6 |
| | | | | EHITPERITRIALTTIRSNPGLQQCSPASLLGAVMQSAQLGLEP | |
| | | | | GLVGHCYFVPFNKKIKGQNGAPDQWVKEVQFIIGYKGMIDLA | |
| | | | | RRSGHIESIYAHAVYEKDEFDYELGLHPKLVHKPSTGHRGEMT | |
| | | | | HVYAVAHFKDGGYQFDVFSKQDIENVRLRSKSKDNGPWQTDY | |
| | | | | EEMAKKTVIRRMWKYLPISIEIQKQVAQDETVRKDITSEAQSVY | |
| | | | | DDNVLDLGGNQFLSEPQQLNEKPSAQDADPFDGKPVDISEDDL | |
| | | | | PFD | |
| N007 | SSAP | recT | Agrobacterium rhizogenes | MTQTAERQPRSVLVDMSMRYGMEPAAFEATVRATCMKPDKN | 7 |
| | | | | GKVPSREEFAAFLLVAKEYNLNPLLKEIYAYPAKGGGIVPIVSV | |
| | | | | DGWVNLINSQAALDGLEFAIEHTDVGALVSITCRIYRKDRSRPI | |
| | | | | EVTEYLSECIRNTEPWAMKHRMLRHKALIQCARYAFGEAGIYD | |
| | | | | EDEGEKIAGMKDVTPPMPPAPPKPPAPPKPDETIADADGVVIEH | |
| | | | | EEPTVEDVAAANEDVIDDTTYFENLEEAMAVVSDAASLEEVW | |
| | | | | SDFDPLSRFDGKPQGEVNQGIALAIRKRAEKRIGGAA | |
| N008 | SSAP | recT | Mycobacterium virus Che9c | MAENAVTKQDSPKAPETISQVLQVLVPQLARAVPKGMDPDRIA | 8 |
| | | | | RIVQTEIRKSRNAKAAGIAKQSLDDCTQESFAGALLTSAALGLE | |
| | | | | PGVNGECYLVPYRDTRRGVVECQLIIGYQGIVKLFWQHPRASRI | |
| | | | | DAQWVGANDEFHYTMGLNPTLKHVKAKGDRGNPVYFYAIVE | |
| | | | | VTGAEPLWDVFTADEIRELRRGKVGSSGDIKDPQRWMERKTA | |
| | | | | LKQVLKLAPKTTRLDAAIRADDRPGTDLSQSQALALPSTVKPT | |
| | | | | ADYIDGEIAEPHEVDTPPKSSRAQRAQRATAPAPDVQMANPDQ | |
| | | | | LKRLGEIQKAEKYNDADWFKFLADSAGVKATRAADLTFDEAK | |
| | | | | AVIDMFDGPNA | |
| SR001 | SSAP | sak | Lactococcus phage | MSVFEQLNAINVNSKVEQKKTGKTSLSYLSWSWAWAEFKKVC | 9 |
| | | | SK1833, Lactococcus phage SK1 | PTATYEIKKFDDGKGKLVPYLVDNSLGIMVFTSVTVDDITHEM | |
| | | | | WLPVMDGANKAMKFDSYTYKTKFGEKTVEPASMFDVNKTIM | |
| | | | | RCLVKNLAMFGLGLYIVSGEDLPDLTEEQKELEAEKQRLREIQP | |
| | | | | ALNRAEELGYPNMELLKTKTKKEIFDIMKIWLAQQETEKGE | |
| SR002 | SSAP | recT | Hafnia alvei ATCC 51873 | MSNTMMLAPQTFDQAMQFANAIAASQFAPSSYRGKPNDVLIA | 10 |
| | | | | MQMGAELGFQPMQSVQGIAVINGRPSVWGDALRALILSAPDL | |
| | | | | AEFEESYDEATQTAHCKISRREQTGSIATENSSESVTDAQTAGL | |
| | | | | WGKNGPWKQYPKRMQQWRALGFCARDSYADRLKGIQLAEEVQD | |
| | | | | YEPIEKVVHTPSQDQDSAIENKITEEQSNRINEILISVDSTFDD | |
| | | | | LKKACKSMTGRDIDNQSELTSTEAAKLISSLERKLASKTGGEKD | |
| | | | | AA | |
| SR003 | SSAP | recT | Corynebacterium striatum ATCC | MSKEIARTQDHLNEMMNWSRAMSQGNLMPRQYQGNPANLM | 11 |
| | | | 6940 | FAAEYADALGISRIHVLTSIAVINGRPSPSADLMSAMVRQHGHK | |
| | | | | LRVAGDDTYAEAVLIRSDDPDFEYTARWDESKARKAGLWGN | |
| | | | | KGPWSLYPGAMLRARAISEVVRMGASDVMAGGIYTPEEVGAV | |
| | | | | VDESGHVVEQPAQHKATRQQAQPQDNSAQARLANMLDATPA | |
| | | | | NTDDPEVWADRIAEAGSEQELMELYATASTNPEWESAIKAMFT | |
| | | | | ARKQQILLDAQYADEAEALDAELVEDTTEESAA | |
| SR004 | SSAP | recT | Lactococcus lactis subsp lactis | MSNQITKTQQTLKSPEVKKKFEEVEGKKTEGFVASLLSVVGNS | 12 |
| | | | bv diacetylactis str TIFN2, | NLKNADANSVMTAAMKAATLDLPIEPSLGFAYVIPYGREAQFQ | |
| | | | Lactococcus lactis subsp lactis | IGYKGFIQLALRSGQLTGLNCGIVYESQFVSYDPLFEELELDFSQ | |
| | | | (strain IL1403) | QASGDAVGYFASMKLANGFKKVTYWSKEQVLAHKKKFVKSA | |
| | | | (Streptococcus lactis), | NGPWRDHFDAMAQKTVLKAMLTKVAPASIESKMIQTAITEDD | |
| | | | Lactococcus phage bIL309 | SERFENAKDVTPDEPVISIDESMTSEVSQNEPATESQEQLPEDEV | |
| | | | | EELFPIGKS | |
| SR005 | SSAP | recA | Mycobacterium phage Che8 | MSLSFKPATREASYARIALSGPSGSGKTYTALALGTALADKVA | 13 |
| | | | | VIDTERGSASKYVGLNGWQFDTVQPDSFSPLSLVELLGLAAGG | |
| | | | | EYGCVIVDSLSHYWMGVDGMLEQADRHAVRGNTFAGWKEV | |
| | | | | RPDERRMIDALVSYPGHVIVTMRSKTEYVIEENERGKKTPRKV | |
| | | | | GMKPEQRDGIEYEFDVVGDLDHDNTLTVVKSRIHTLAKAVVP | |
| | | | | MPGEEFAHQIRDWLSDGARVPTVAEYRKQALAAETREELKAL | |
| | | | | YDEVSGHKLTVAPTVDRDGNSTVLGDLITDLAREMKRAEA | |
| SR006 | SSAP | gp2.5 | Xanthomonas phage OP2 | MSIADHVAIFLAGSLDAPKAGKAKPDRPEFWGLFAFPPSAGAD | 14 |
| | | | | LTAACQAAAGGSLAGMRLAPKLHSRLEPDKQFAGIPQDWLIVR | |
| | | | | MGTGPDFPPALFLLDGSSVQALPINGAKIRTDLFAGQKVRVNA | |
| | | | | HGFAYPPKNGGPAGVSFSLDGVMAVGGGERRSSSSEGGEPSES | |
| | | | | VFAKYRAEVAAAPAASTAPATTGNPFQQSAAGTDNPFG | |
| SR007 | SSAP | gp2.5 | Burkholderia phage BcepNY3 | MSTIDKLAGYEAILTHHSIITPQINKLKPTKPAEFYALIALPAAA | 15 |
| | | | | QADLWAILCERATSAFGHANNEEHGIKTNATSKKPIAGVPGDA | |
| | | | | LVVRAASQYAPEIYDADGTLLNPQNPAHLQTIKAKFFAGTRVR | |
| | | | | TILTPFHWTFQGRNGVSFNLAGIMLVPSEAQRLAIGGVDTASAF | |
| | | | | KKFAQPGTGGVPATAGAPTDAAAAFAAGGNPDAAGGTLPANP | |
| | | | | NPFAQQTGSAAGAGGNPFL | |
| SR008 | SSAP | gp2.5 | Pseudomonas phage | MSKKVSQRFTFPVAKLIFPYIVTPDTEYGEVYQVTICIPTKEQAD | 16 |
| | | | vB_PaeP_C1-14_Or, Pseudomonas | ELVAKMESKDARLKGTIKYTERDGEFLFKVKQKKHVDWMQD | |
| | | | phage vB_PaeP_p2- | GERKSAVMKPIVLTSDNKPYDGPNPWGGSTGEVGILIETQKGA | |
| | | | 10_Or1, Pseudomonas phage PaP3 | RGKGTITALRLRGVRLHEIVSGGDGEDDPLFGGGFTEEEDKPED | |
| | | | | VFGEDFDDEDAPI | |
| SR009 | SSAP | recA | Paenibacillus dendritiformis | MSDRRAALEMALRQIEKQFGKGSIMKLGESNHMQVEIVPSGSL | 17 |
| | | | C454 | ALDIALGIGGLPRGRIIEVYGPESSGKTTVALHAIAEAQKVGGQ | |
| | | | | AAFIDAEHALDPTYASKLGVNIDELLLSQPDTGEQALEIAEALV | |
| | | | | RSGAVDIIVIDSVAALVPKAEIEGEMGDSHVGLQARLMSQALR | |
| | | | | KLSGAISKSKTIAIFINQLREKVGVMFGNPETTPGGRALKFYSTI | |
| | | | | RLDVRRVETIKQGNDMIGNRTRIKVVKNKVAPPFKQADIDIMY | |
| | | | | GEGISREGSIVDIGTEMDIIQKSGAWYSYEGERLGQGRENAKQF | |
| | | | | LKENGELALTIENKVREASNLSTVVRNHSEHDAEEAEDALELE | |
| | | | | LES | |
| SR010 | SSAP | recT | Neisseria lactamica Y92-1009 | MSIAQNQAVALAKQFNIQGDPQELVQTLKATAFKGNATDAQF | 18 |
| | | | | NALMIVSTQYGLNPFTKEIYAFPDKNNGITPVVGVDGWARIINS | |
| | | | | HPQFDGMEFAADAESCTCKIHRKDRNHPTIVTEYLEECRRNTQ | |
| | | | | PWNSHPRRMLRHKAMIQAARLAFGFGGIYDEDEAQRIQTTETP | |
| | | | | ETPKEVKADPELDSLLAEGEAAANKGIEEYKKWFSEIGATGRL | |
| | | | | KLGSENHERFKQIAANTIEAETAETLKPTPTEEQFAALVEAVST | |
| | | | | GVKEVAEVLEAYALTDEQAAEINAL | |
| SR011 | SSAP | ERF | Thalassomonas phage BA3 | MSKSELVTQDQSSEPVMAEPHMRLIEIAVEKGADITQLEKLMD | 19 |
| | | | | LQERYEANQAKKDFNEAMSKFQSLLPTIEKSGVVDYTTNKGRT | |
| | | | | YYDYAKLEDIAKAIRPALKETGLSYRFSQSQNQGWITVTCIVTH | |
| | | | | ASGHSEVSELTSQPDVSGGKDPLKAIASAISYLRRYTLTGSLGIV | |
| | | | | VGGEDDDGGNHQEANDETDCYSDEEFKKNFPNWEKAILAGKK | |
| | | | | TPEQIIKAGNAQGITFSQQQLETIEKVGNV | |
| SR012 | SSAP | recT | Commensalibacter intestini A911 | MVPKTFTPADIVVAVQLGTSIGLSVAQSLHNIAIINGKPSIYGDM | 20 |
| | | | | MLALCRASPECEYVKEEMEGNKKEEWVAICTVKRKGNPEVIS | |
| | | | | KFSWQDAVDAKLTGKPGPWLSYPKRMLQMRARGFALRDAFP | |
| | | | | DLLNGLISQEEAQDYPTQTIEPPPVQLQSKPVAEQEVIQEMPSIE | |
| | | | | PEKSELIKRYDWLVGQLTDIESREYLEKLTSQTKIINLRNELTEK | |
| | | | | EPKLAAVITDLIEQALASFEEQGELANAV | |
| SR013 | SSAP | sak4 | Mycobacterium phage | MVQSKIIKVADDEDYVNLLVYGDSGVGKTVFCGSDDKVLFVA | 21 |
| | | | Troll4, Mycobacterium phage | PEDNSDGLLSAKLAGTTADKWPIRDWGDLVEAYNYLDELDEIP | |
| | | | Gumball, Mycobacterium phage | YNWIVVDSLTEMQIMAMRDILDRAVEENPSRDPDIPQIQDWQK | |
| | | | Nova, Mycobacterium phage | YYEMVKRMIKCFNALPVNVLYTALSRQTEDEEGTEYLLPDLQ | |
| | | | SirHarley, Mycobacterium phage | GKKDNYAKQVVSWMTSFGCMQIKRVRVKTDDDIAKKVKEVR | |
| | | | Adjutor, Mycobacterium phage | RITWKDTGLVTGKDRTNALTPYTDIRDVTDPEDDGLTLKDIRL | |
| | | | Butterscotch, Mycobacterium | RIERKKSGSAKSATTKRPARKTASARTQKESA | |
| | | | phage PLot, Mycobacterium | | |
| | | | phage PBI1 | | |
| SR014 | SSAP | recT | Ureaplasma urealyticum serovar | MVKDDKLVPSIRLLTPNELSEQWANPNSEINQITRAVLTIQGIDL | 22 |
| | | | 12 str ATCC 33696 | KAIDLNQAAQIIYFCQANNLNPLNKEVYLIQMGNRLAPIVGIHT | |
| | | | | MTERAYMSGRLVGITQSYNDTNKSAKTTLTIRIPNLKELGVIEA | |
| | | | | EVFLSEYSTNKNLWLTKPITMLKKVSLAHALRLSGLLAFKGDT | |
| | | | | PYIYEEMQQGEAVPNKKMFTPPVAEVIEPAVENIKKVDFNEF | |
| SR015 | SSAP | ERF | Paenibacillus alvei DSM 29 | MGLKRSESITNLAAALVKFQKEVVSPKNNANNPYFSSKYAPLH | 23 |
| | | | | EVINVIREPLAKYGLSYIQSTSTDEQNVTVTTLLMHESGEFVESE | |
| | | | | PLSLPGLQVLKGGGKDFTPQGIGSAITYGRRYSLTAILGIASEDD | |
| | | | | TDGNEGTPDPRNNPSKGKNQGTGAQTGTGGVKKTIEAKYKLL | |
| | | | | HDNSLDGLTDFIKEHGANAEQVLTQMLMDR | |
| SR016 | SSAP | recT | Pseudomonas aeruginosa 39016 | MGTALTPLLTKFATRYEMGTTPEEVANTLKQTCFKGQVNDSQ | 24 |
| | | | | MVALLIVADQYKLNPFTKELYAFPDKNNGIVPVVGVDGWARII | |
| | | | | NENPQFDGMEFSMDQQGTECTCKIYRKDRSHAISATEYMAEC | |
| | | | | KRNTQPWQSHPRRMLRHKAMIQCARLAFGFAGIYDQDEAERI | |
| | | | | VERDVTPAEQYEDVSEAICLIKDSPTMEDLQAAFSNAWKAYKT | |
| | | | | KGARDQLTAAKDQRKKELLDAPIDVEFEETGDDRAA | |
| SR017 | SSAP | gp2.5 | Salmonella phage SETP3 | MGIKLNLRKVQTAWLNVFERAKDRENSDGSITKGTYNGTFILT | 25 |
| | | | | PEHPQIEELRDTVFAVVSEALGEAAAEKWMKQNYGEGKHMD | |
| | | | | KCAVRDIAERDNPFEDFPEGFYFQAKNKQQPLILTSVKGEKQV | |
| | | | | EPDFNIDGEQIEGKQVYSGCVANISIEIWFSEQYKVEGAKLNGIK | |
| | | | | FAGEGKAFGGSAVSASVDDLEDDEDETPRRERRRNR | |
| SR018 | SSAP | ERF | Paenibacillus dendritiformis | MGTEKLNIYQKLLEVRKSVSYLKKEETSQQYKYTGSAQVLAS | 26 |
| | | | C454 | VRDKINEMGLILVPRILDKSLLTETVEFIDKEKPKKTTTYFTELT | |
| | | | | LSMTWVNADNPSETVECPWYSQGVDIAGEKGVGKALTYGEK | |
| | | | | YFILKFFNIPTDKDDPDAFQKKFEQKASKEIQAKIRETWIKLGLK | |
| | | | | INLLEHQCKTIYGSGLAQLSEEAAEEFLTMLEAKMGDPDGVN | |
| SR019 | SSAP | recT | Enterococcus faecalis | MGNELIVSVQNRIQEMQHGEGLRLPTGYSVGNALNSAYLILSD | 27 |
| | | | TX0309B, Enterococcus faecalis | NSKGKSLLEKCHPTSVSKALLNMAIQGLSPAKNQCYFVPYGDQ | |
| | | | TX0309A, Enterococcus faecalis | CTLMRSYFGSVSILERLSNVKKVHAEVIFEGDEFEIGSEDGRTV | |
| | | | (strain ATCC 700802/V583) | VTNFKPSFLNRDNPIIGAFAWVEQTDGIKVYTIMTKKEIYKSWS | |
| | | | | KAKTKNVQNDYPQEMAKRTVLSRAAKMFINSSSDNDLLVKAI | |
| | | | | NETTEDEYDNNQPRKDITPNPPNIEKLEKSIFNQDENKKIAQDMI | |
| | | | | DSIDLNQADKDLQEELNIEFPDPSKNYLATGEVNGDVENEDGP | |
| | | | | YPF | |
| SR020 | SSAP | sak4 | Enterobacteria phage | MGTATLILGESGTGKSTSMRNINPEEAILIKPIGKPLPFKSKEWL | 28 |
| | | | HK629, Salmonella phage HK620 | AWDARAKKGTVVTTDKWDVIVAVIKRAHEYGKRIVIVDDFQY | |
| | | | (Bacteriophage HK620) | VMSNEFMRRSEEKSFDKFTEIGRHAWEVIKAAQDAPDDLRVYF | |
| | | | | LAHTEETPMGRVKMKTIGKMLDEKITVEGMFTIVLRTLTRDDQ | |
| | | | | FFFTTKNNGADTVKSPMGMFDSNEIDNDLSFVDATVCDYYGIN | |
| | | | | NVHQIKENAA | |
| SR021 | SSAP | recT | Klebsiella pneumoniae subsp | MAGKLASRLGMDAGTDLMNTLKNTAFKGGNVTDDQFTALLI | 29 |
| | | | rhinoscleromatis ATCC 13884 | VANQYGLNPWTKEIYAFPDKGGIVPVVGVDGWVRIINEHPQFD | |
| | | | | GMGFTYDKEEGACTCKIYRKDRTHPTIVTEYMGECKRNTQPW | |
| | | | | QSHPTRMLRHKTLIQCARLAFGFAGIFDQDEAERVIEGSAAEVH | |
| | | | | VGHESDSRRPELIAKGESAARLGTVKYQEFWVALSAEEKQVIG | |
| | | | | AVEKRRMYDMSLAVDNAEPVDAAA | |
| SR022 | SSAP | recT | Clostridium sporogenes (strain | MAENKNSAVALLEKEMVYQVGEEEVKLTGSIVKNYLAKGNK | 30 |
| | | | ATCC 7955/DSM 767/NBRC | QITNREVVVFMNLCKYRKLNPFLNEAYLVKFKDEAQIVTGKEA | |
| | | | 16411/NCIMB 8053/NCTC | FMRKAEENPNYKGHRAGIIVMREKEIVELEGCFKLKTDTLLGG | |
| | | | 8594/PA 3679) | WAEVMVEGKNCPIVAKVSLEEYNKQQSTWKSMPSTMIRKVAL | |
| | | | | VQALREAFPAEIGAMYSNEELGVDESKIVNVQHEVKEEIKEEA | |
| | | | | NKEVIDIEETELVEKETPVVEAEIVEPKDGEEETPY | |
| SR023 | SSAP | ERF | Staphylococcus phage | MAEQLNLYQKIADVKANIAGFTKDTKGYNFSYVSGSQILHRIR | 31 |
| | | | SA97, Staphylococcus phage | EKMIEHNLLLVPNTSNENWTTHTFKNKKGQEVTEFIVEMDLNY | |
| | | | phi7247PVL, Staphylococcus | TWINADKPEEQYEVSYHAYGQQNDISQAHGTALTYAERYFLM | |
| | | | phage phiETA3, Staphylococcus | KFFNIPTDEDDADAKQKQDKYSTVSQEFKDILTKEVNDFIAIAK | |
| | | | aureus, Staphylococcus phage | ESGFAEKYQEQINKLEKMNVEALNKNQINVTRQQIKKWLGGIE | |
| | | | phi5967PVL | Q | |
| SR024 | SSAP | gp2.5 | Paenibacillus lactis 154 | MAIDNQSTKVITGKVRLSYTHVFEPQENDSGDMKYSTAILIPKS | 32 |
| | | | | DKETLRKIKAAVDAAKELGKSKWGGKIPANCKTPLRDGDEER | |
| | | | | PDDEAYAGHYFLNASSKNKPGVAKPIGKDGNGKTKFQEITDST | |
| | | | | EVYSGCYAKVSLNFYPFDAKGNRGVAAGLNNIVKVQDGDFLG | |
| | | | | GRSSVNDDFANEDFDDIVDISDDDDFLN | |
| SR025 | SSAP | recT | Desulfitobacterium | MAITPNPIPAQDGSPIPSPDDIVGELARRKIYAGIPDDDVALALA | 33 |
| | | | metallireducens DSM 15288 | LCQKYGFDPLLKHLVLLATKDRDETTGQGQKHYNAYVTRDGL | |
| | | | | LHVAHTSGMLDGLETIQGKDDLGEWAEAVVYRKDMSRPFRY | |
| | | | | RVYLSEYVREAKGVWKTHPQAMLTKTAEVFALRRAFDVALTP | |
| | | | | FEEMGFDNQNIAGDTGPSPKTGFTEKAGFTGNTDFSAEASLPG | |
| | | | | KARFSTEAGLTDMTVIPPNRVTGSIPETSRLNTSAGSTGRQRRQ | |
| | | | | LF | |
| SR026 | SSAP | recT | Listeria monocytogenes | MATNDELKNQLANKQNGGQVASAQSLDLKGLLEAPTMRKKF | 34 |
| | | | | EKVLDKKAPQFLTSLLNLYNGDDYLQKTDPMTVVTSAMVAAT | |
| | | | | LDLPIDKNLGYAWIVPYKGRAQFQLGYKGYIQLALRTGQYKSI | |
| | | | | NVIEVRDGELLKWNRLTEEIELDLDNNTSEKVIGYCGYFQLING | |
| | | | | FEKTVYWTRKEIEAHKKKFSKSDFGWKKDYDAMAKKTVLRN | |
| | | | | MLSKWGILSIDMQTAVTEDEAEPRERKDVTEDESIPDIIDAPITP | |
| | | | | SDTLEAGSEVQGSMI | |
| SR027 | SSAP | recT | Bacillus phage SPP1 | MATKKQEELKNALAQQNGAVPQTPVKPQDKVKGYLERMMPA | 35 |
| | | | (Bacteriophage SPP1) | IKDVLPKHLDADRLSRIAMNVIRTNPKLLECDTASLMGAVLES | |
| | | | | AKLGVEPGLLGQAYILPYTNYKKKTVEAQFILGYKGLLDLVRR | |
| | | | | SGHVSTISAQTVYKNDTFEYEYGLDDKLVHRPAPFGTDRGEPV | |
| | | | | GYYAVAKMKDGGYNFLVMSKQDVEKHRDAFSKSKNREGVV | |
| | | | | YGPWADHFDAMAKKTVLRQLLNYLPISVEQLSGVAADERTGSE | |
| | | | | LHNQFADDDNIINVDINTGEIIDHQEKLGGETNE | |
| SR028 | SSAP | recT | Haemophilus influenzae, | MATALQTLTNKLADRFDMGDGTGLTDVLTNTAFRGQKVSQD | 36 |
| | | | Haemophilus influenzae NT127 | QMTALLVVANQYGLNPWTNEVYAFPNNGGIVPIVGVDGWARI | |
| | | | | MNEHPQYDGMDFSFSEKGDSCTCTIYRKDRSRPIIVTEYMAEC | |
| | | | | QRNTQPWKSHPKRMLRHKAMIQCARLAFGFTGIYDQDEAERI | |
| | | | | VETKDPINVTPQPTVDETQAVELITPEQIEQITQLVEVTQSNMTQ | |
| | | | | LLAAAGRAPSEEKVTKANAKHVIEKLLTKLDKQQAQDEQLGE | |
| | | | | DVPIC | |
| SR029 | SSAP | recT | Clostridium botulinum C str | MANLMEIENKFEVNGAEVKLTGSIVKNYLTRGNDAVSDQEVV | 37 |
| | | | Eklund | MFINLCKYQKLNPFLNEAYLVKFKGSPAQIITSKEAYMKKAER | |
| | | | | NTNFAGMKAGIIVQRDKEILELEGSFCLKTDILLGGWAEVYKK | |
| | | | | DREFPYKAKINLDEYDKGQSTWKKMPKTMIRKTAIVQALREAF | |
| | | | | PEDLGAMYVEEEQQYQQDMSVEIKEEIKEKGNSKPLTLNPKTT | |
| | | | | ENVQNVQEVKVEEVEIIN | |
| SR030 | SSAP | gp2.5 | Synechococcus phage Syn5 | MANRYVFNTTLEGFINVYEDSGKFNNRTFAYKFDAATLEQAE | 38 |
| | | | | KDREELLKWAKSKATGRVQEAMTPWDDEGLCKYTYGAGDGS | |
| | | | | RKGKPEPIFVDSDGEVIDRNVLKDVRRGTKVRLIVQQKPYSMG | |
| | | | | PNVGTSLRVLGVQIIELATGNGAVDSGDLSVDDVAALFGKADG | |
| | | | | YKASEPAVRKAEDTVGDGDSYDF | |
| SR031 | SSAP | recT | Peptoniphilus duerdenii ATCC | MANIVKYETSNGEVQLDKQTIKNYLVSGDADKVTDQELELFIN | 39 |
| | | | BAA-1640 | LCKYQKLNPFLRDAYLVKFGDKPANMIVGKDFFIKRASANENF | |
| | | | | KGYTAGVIVLGKTGNIEERPGSFYAKQVESLVGAWCKVEFTNG | |
| | | | | TDFYHTVAFDEYNTGKSTWASKPATMIRKVALVQALREAFPE | |
| | | | | DYQGLYDSSEMGVNEEVLPTDGVKVKAPTISKEQFNLLLKTLG | |
| | | | | EDAIVDFCKSKGYNDAAKIKVDEYEKLIAEATKKKEEDEEVIE | |
| | | | | YEDVDPDFKDLQDEDNNFEINEEELPF | |
| SR032 | SSAP | recT | Paenibacillus mucilaginosus 3016 | MAAPAKATDQKDLSKALANKAAAGNGQGKTIAQLFDEMKPAI | 40 |
| | | | | AQAIPKHLTPERLERIATTSIRTNPKLKVCTPESLLGAVMQCAQ | |
| | | | | LGLEPSILGHAYLVPYRNKKKEGNKEYFVDEAQFQIGYKGLIEL | |
| | | | | ARRTGHISSIMSQAVHEKDLFEYEYGINEKLRHVPADGDRGPV | |
| | | | | TKYVAYAKFKDGGYSFMVMSKRDIELHRDKFSKAKFGPWVD | |
| | | | | HFDEMAKKTVLKALMKYMPISVEFQKAVSMDETTKREVSDD | |
| | | | | MSEVIDVTDWSESSAEDAGGGDEQRDPDTGLLNDRPPDDQVE | |
| | | | | FE | |
| SR033 | SSAP | rad52 | Lactococcus phage | MADYEEQMLALQKPLQPDRVVWRVQQSGFSKQGKPWAMVL | 41 |
| | | | bIL286, Lactococcus lactis subsp | AYMDNRAVQERFDEVFGIAGWKNEFKTAPDGGTECGISVKFG | |
| | | | lactis (strain IL1403) | DEWVTKWDGAENTQVEAVKGGLSGSMKRAAVQWGVGRYLY | |
| | | | (Streptococcus lactis) | DLPTSFAQTSLEKTDGWNKVFDKNSKKNFWWKNPQLPSWALP | |
| | | | | QNSKVQNTKADFTEEEIPNPPKLYVVGKDKKEFDEKKLQAVV | |
| | | | | NKMAIIAGKDYGASVDEQNDWLKMPLDEAYNDIEKFVDIKKE | |
| | | | | EQND | |
| SR034 | SSAP | other | Drosophila melanogaster (Fruit | MASNNSSTTDLDSQVNVEDLPITEKVKYIGSEVARGLWGIKYT | 42 |
| | | | fly) | RRPVDIMVGVAKNLPPNKVLPNCELKVSTDGVQLEIISPKASIN | |
| | | | | HWSYPIDTISYGVQDLVYTRVFAMIVVKDESSPHPFEVHAFVC | |
| | | | | DSRAMARKLTFALAAAFQDYSRRVKEATGEEEGEATPSDTITP | |
| | | | | TRHKFAIDLRTPEEIQAGELEQETEA | |
| SR035 | SSAP | gp2.5 | Burkholderia phage BcepNazgul | MAREIKFKGKNVVVFTDGTMRIENVRASYPHLAKPYKGDDQE | 43 |
| | | | | GQEKYSLVGFIEKDLAKSVLEVMKKMRDEMLREKNDGKKIPT | |
| | | | | DKFFFRDGDASGKDEYEGCYTINASETKRPSVRGADKRLLGER | |
| | | | | EIENTIYAGCRVNILINPWWQDNKFGKRINANELAVQFVRDDE | |
| | | | | PIGEGRISEDEIDDSFDDVSDGEEALAEGYDDNGGL | |
| SR036 | SSAP | recT | Legionella pneumophila | MATQKVDKRSMMVANQKTVMGLLEQMKGEIARCEPKHLTPE | 44 |
| | | | | RMARIAMTELRKTPKLQECDPLSFIASIMQAAQEGLEPGILGSC | |
| | | | | YLIPFWNSKLGKFECTFMPGYRGFLDLARRSGQIVSLVARSVYE | |
| | | | | NDEFSYEFGLKENIIHKPAMDNKGQLIAVYAVAILKDGGHQFD | |
| | | | | VMSKEEVDTVRETSKSKDNGPWVTHYEEMAKKTVLRRLFKW | |
| | | | | LPCSVEMQKAVSLDEMQEAGMQNIKVAASEEFDIDFVIDADTG | |
| | | | | EVTEIPGNKSREDLKALIEKNKAESKNSQEKETNQDKA | |
| SR037 | SSAP | recT | Lactococcus phage | MANELGIFSVDNLNMTTIKQYLDGGGKASDAELVLLINLCKQN | 45 |
| | | | phi311, Lactococcus phage | NMNPFMKEVYFIKYGNQPAQIVVSRDFYRKRAFQNPNFVGIEV | |
| | | | ul36k1t1, Lactococcus phage | GVIVLNKDGVLEHNEGTFKTHEQELVGAWARVHLKNTEIPVY | |
| | | | ul362, Lactococcus phage | VAVSYDEYVQMKDGHPNKMWTNKPCTMLGKVAESQALRMA | |
| | | | ul361, Lactococcus lactis, | FPAEFSGTYGEEEYPEPEKEPREVNGVKEPDRAQIESFDKEDYA | |
| | | | Lactococcus phage ul36k1 | AKKIEELKEKAQPQKEVVEETGEVIDEEPLEGF | |
| SR038 | SSAP | recT | Streptococcus phage M102 | MAKNELAKGSYLTDLQKLDGNTLRDFVDPKHQASPQELQALL | 46 |
| | | | | AIVKGRNLNPFTKEVYFIKYGSAPAQIVVSKEAIMKRAEENPDF | |
| | | | | DGFEAGIVVETKDGAIERLTGTIVPKSATLRGGWCKVYRKDRS | |
| | | | | HAIEADADFAYYTTSKNLWQKMPALMIRKVAIVSAFREAFSES | |
| | | | | VGGLYTADEMQRETQAEVRARKMKEAYEEKLYELTQMEAKS | |
| | | | | YKKTKSKNENEAKKTKEAEAIETVEEPTQDGNLEW | |
| SR039 | SSAP | ERF | Streptococcus phage MM1 | MADLTFAELQRKMQIEKQTKQGVKYPFRTAEDINNKFKSLDSG | 47 |
| | | | 1998, Streptococcus pneumoniae, | WSVSDPEDDIIQKGDKLYYKAVAVVKRESDGTIEKAIGWAREE | |
| | | | Streptococcus phage MM1 | DVPIFHTQKGDVKQMQDPQWTGAVGSVARKYALQGLFAIGGE | |
| | | | | DVDEYPVEESQEQGQNNQQQKPNNQQAQGQNQVRYIDNTQY | |
| | | | | QEINDLINDIAKIKGMPFDTLANYVLSEKLKGLQDFHRVQVGD | |
| | | | | YEVLKNYLTEQLAKAKAKAKRGN | |
| SR040 | SSAP | recT | Paenibacillus elgii B69 | MAQNKAIQTIDTQAVVGSFTQSELDTLKNTIAKGTTNEQFSLEV | 48 |
| | | | | QTCARSGLNPFLNQIYCIVYNTRDHGPTMSIQIAVEGIVALAKR | |
| | | | | HPQYKGFIASEVKENDEFQIDVVSGEPVHKIKTLQRGKTIGAYC | |
| | | | | VAYREGAPNISVIVTLDQIEHLLKGRNATMWKDYEDDMIVKH | |
| | | | | AIKRAFKRQFGIEVAEDEYIPSGPNIDNIPEYQPQARRDITHEAE | |
| | | | | LLAAAGRAPSLEKVTKANAKHVIEKLLTKLDKQQAQDEQLGE | |
| | | | | DVPIC | |
| SR029 | SSAP | recT | Clostridium botulinum C str | MANLMEIENKFEVNGAEVKLTGSIVKNYLTRGNDAVSDQEVV | 37 |
| | | | Eklund | MFINLCKYQKLNPFLNEAYLVKFKGSPAQIITSKEAYMKKAER | |
| | | | | NTNFAGMKAGIIVQRDKEILELEGSFCLKTDILLGGWAEVYKK | |
| | | | | DREFPYKAKINLDEYDKGQSTWKKMPKTMIRKTAIVQALREAF | |
| | | | | PEDLGAMYVEEEQQYQQDMSVEIKEEIKEKGNSKPLTLNPKTT | |
| | | | | ENVQNVQEVKVEEVEIIN | |
| SR030 | SSAP | gp2.5 | Syncchococcus phage Syn5 | MANRYVFNTTLEGFINVYEDSGKFNNRTFAYKFDAATLEQAE | 38 |
| | | | | KDREELLKWAKSKATGRVQEAMTPWDDEGLCKYTYGAGDGS | |
| | | | | RKGKPEPIFVDSDGEVIDRNVLKDVRRGTKVRLIVQQKPYSMG | |
| | | | | PNVGTSLRVLGVQIIELATGNGAVDSGDLSVDDVAALFGKADG | |
| | | | | YKASEPAVRKAEDTVGDGDSYDF | |
| SR031 | SSAP | recT | Peptouiphilus duerdenii ATCC | MANIVKYETSNGEVQLDKQTIKNYLVSGDADKVTDQELELFIN | 39 |
| | | | BAA-1640 | LCKYQKLNPFLRDAYLVKFGDKPANMIVGKDFFIKRASANENF | |
| | | | | KGYTAGVIVLGKTGNIEERPGSFYAKQVESLVGAWCKVEFTNG | |
| | | | | TDFYHTVAFDEYNTGKSTWASKPATMIRKVALVQALREAFPE | |
| | | | | DYQGLYDSSEMGVNEEVLPTDGVKVKAPTISKEQFNLLLKTLG | |
| | | | | EDAIVDFCKSKGYNDAAKIKVDEYEKLIAEATKKKLEDEEVIE | |
| | | | | YEDVDPDFKDLQDEDNNFEINEEELPF | |
| SR032 | SSAP | recT | Paenibacillus mucilaginosus 3016 | MAAPAKATDQKDLSKALANKAAAGNGQGKTIAQLFDEMKPAI | 40 |
| | | | | AQAIPKHLTPERLLRIATTSIRTNPKLKVCTPESLLGAVMQCAQ | |
| | | | | LGLEPSLLGHAYLVPYRNKKKEGNKEYFVDEAQFQIGYKGLIEL | |
| | | | | ARRTGHISSIMSQAVHEKDLFEYEYGINEKLRHVPADGDRGPV | |
| | | | | TKYYAYAKFKDGGYSFMVMSKRDIELHRDKFSKAKFGPWVD | |
| | | | | HFDEMAKKTVLKALMKYMPISVEFQKAVSMDETTKREVSDD | |
| | | | | MSEVIDVTDWSESSAEDAGGGDEQRDPDTGLLNDRPPDDQVE | |
| | | | | FE | |
| SR033 | SSAP | rad52 | Lactococcus phage | MADYEEQMLALQKPLQPDRVVWRVQQSGFSKQGKPWAMVL | 41 |
| | | | bIL286, Lactococcus lactis subsp | AYMDNRAVQERFDEVFGIAGWKNEFKTAPDGGTLCGISVKFG | |
| | | | lactis (strain IL1403) | DEWVTKWDGAENTQVEAVKGGLSGSMKRAAVQWGVGRYLY | |
| | | | (Streptococcus lactis) | DLPTSFAQTSLEKTDGWNKVFDKNSKKNFWWKNPQLPSWALP | |
| | | | | QNSKVQNTKADFTEEEIPNPPKLYVVGKDKKEFDEKKLQAVV | |
| | | | | NKMAIIAGKDYGASVDEQNDWLKMPLDEAYNDIEKFVDIKKE | |
| | | | | EQND | |
| SR034 | SSAP | other | Drosophila melanogaster (Fruit | MASNNSSTTDLDSQVNVEDLPITFKVKYIGSEVARGLWGIKYT | 42 |
| | | | fly) | RRPVDIMVGVAKNLPPNKVLPNCELKVSTDGVQLEIISPKASIN | |
| | | | | HWSYPIDTISYGVQDLVYIRVFAMIVVKDESSPHPFEVHAFVC | |
| | | | | DSRAMARKLTFALAAAFQDYSRRVKEATGEEEGEATPSDTITP | |
| | | | | TRHKFAIDLRTPEEIQAGELEQETEA | |
| SR035 | SSAP | gp2.5 | Burkholderia phage BcepNazgul | MAREIKFKGKNVVVFTDGTMRIENVRASYPHLAKPYKGDDQE | 43 |
| | | | | GQEKYSLVGFIEKDLAKSVLEVMKKMRDEMLREKNDGKKIPT | |
| | | | | DKFFFRDGDASGKDEYEGCYTLNASETKRPSVRGADKRLLGER | |
| | | | | EIENTIYAGCRVNILINPWWQDNKFGKRINANLLAVQFVRDDE | |
| | | | | PIGEGRISEDEIDDSFDDVSDGEEALAEGYDDNGGL | |
| SR036 | SSAP | recT | Legionella pneumophila | MATQKVDKRSMMVANQKTVMGLLEQMKGEIARCLPKHLTPE | 44 |
| | | | | RMARIAMTELRKTPKLQECDPLSFIASLMQAAQLGLEPGILGSC | |
| | | | | YLIPFWNSKLGKFECTFMPGYRGFLDLARRSGQIVSLVARSVYE | |
| | | | | NDEFSYEFGLKENIIHKPAMDNKGQLIAVYAVAILKDGGHQFD | |
| | | | | VMSKEEVDTVRETSKSKDNGPWVTHYEEMAKKTVLRRLFKW | |
| | | | | LPCSVEMQKAVSLDEMQEAGMQNIKVAASEEFDIDFVIDADTG | |
| | | | | EVTEIPGNKSREDLKALIEKNKAESKNSQEKETNQDKA | |
| SR037 | SSAP | recT | Lactococcus phage | MANELGIFSVDNLNMTTIKQYLDGGGKASDAELVLLLNLCKQN | 45 |
| | | | phi311, Lactococcus phage | NMNPFMKEVYFIKYGNQPAQIVVSRDFYRKRAFQNPNFVGIEV | |
| | | | ul36k1t1, Lactococcus phage | GVIVLNKDGVLEHNEGTFKTHEQELVGAWARVHLKNTEIPVY | |
| | | | ul362, Lactococcus phage | VAVSYDEYVQMKDGHPNKMWTNKPCTMLGKVAESQALRMA | |
| | | | ul361, Lactococcus lactis, | FPAEFSGTYGEEEYPEPEKEPREVNGVKEPDRAQIESFDKEDYA | |
| | | | Lactococcus phage ul36k1 | AKKIEELKEKAQPQKEVVEETGEVIDEEPLEGF | |
| SR038 | SSAP | recT | Streptococcus phage M102 | MAKNELAKGSYLTDLQKLDGNTLRDFVDPKHQASPQELQALL | 46 |
| | | | | AIVKGRNLNPFTKEVYFIKYGSAPAQIVVSKEAIMKRAEENPDF | |
| | | | | DGFEAGIVVETKDGAIERLTGTIVPKSATLRGGWCKVYRKDRS | |
| | | | | HAIEADADFAYYTTSKNLWQKMPALMIRKVAIVSAFREAFSES | |
| | | | | VGGLYTADEMQRETQAEVRARKMKEAYEEKLYLLTQMEAKS | |
| | | | | YKKTKSKNENEAKKTKEAEAIETVEEPITQDGNLEW | |
| SR039 | SSAP | ERF | Streptococcus phage MM1 | MADLTFAELQRKMQIEKQTKQGVKYPFRTAEDINNKFKSLDSG | 47 |
| | | | 1998, Streptococcus pneumoniae, | WSVSFPEDDIIQKGDKLYYKAVAVVKRESDGTIEKAIGWAREE | |
| | | | Streptococcus phage MM1 | DVPIFHTQKGDVKQMQDPQWTGAVGSYARKYALQGLFAIGGE | |
| | | | | DVDEYPVEESQEQGQNNQQQKPNNQQAQGQNQVRYIDNTQY | |
| | | | | QEINDLLNDIAKIKGMPFDTLANYVLSEKLKGLQDFHRVQVGD | |
| | | | | YEVLKNYLTEQLAKAKAKAKRGN | |
| SR040 | SSAP | recT | Paenibacillus elgii B69 | MAQNKAIQTIDTQAVVGSFTQSELDTLKNTIAKGTTNEQFSLFV | 48 |
| | | | | QTCARSGLNPFLNQIYCIVYNTRDHGPTMSIQIAVEGIVALAKR | |
| | | | | HPQYKGFIASEVKENDEFQIDVVSGEPVHKIKTLQRGKTIGAYC | |
| | | | | VAYREGAPNISVIVTLDQIEHLLKGRNATMWKDYLDDMIVKH | |
| | | | | AIKRAFKRQFGIEVAEDEYIPSGPNIDNIPEYQPQARRDITHEAE | |
| | | | | QMNNEKEQPASPQPSEDDEAAKIKKARTEMKKKFAQLGITDPE | |
| | | | | EISAYIAKNAKIKGEKPTLAEYTGLLKIMDMEIERRKAEQANDD | |
| | | | | DLLMD | |
| SR041 | SSAP | gp2.5 | Burkholderia phage BcepC6B | MAKIKLTNVRIAFINNLRTPAEFEAGDGKFRYSATFLVEKGSAN | 49 |
| | | | | DKAIEAAIKSVAVEGWAKKADAMLESFRSNSNKFCYQNGDLK | |
| | | | | DFDGFEGNMYIAAHRKRDDGRPLLLDNVADPETGKPARLVDA | |
| | | | | NGEWLAGKEGRIYAGCYVNATIDIYAQTKTNPGIRCGLMGVQ | |
| | | | | YHGPGDSFSGASRANEDDFEATAPETEDELD | |
| SR042 | SSAP | gp2.5 | Yersinia phage YpsP-G, Yersinia | MAKKIFTSALGTAEPYAYIAKPDYGNEERGFGNPRGVYKVDLT | 50 |
| | | | phage phiA1122 | IPNKDPRCQRMVDEIVKCHEEAYAAAVEEYEANPPAVARGKK | |
| | | | | PLKPYEGDMPFFDNGDGTTTFKFKCYASFQDKKTKETKHLNLV | |
| | | | | VVDSKGKKMEDVPIIGGGSKLKVKYSLVPYKWNTAVGASVKL | |
| | | | | QLESVMLVELATFGGGEDDWADEVEENGYVASGSAKASKPRD | |
| | | | | EESWDEDDGDSYEEDSDGDF | |
| SR043 | SSAP | recA | Prochlorococcus phage P-SSM2 | MDFLKEIVKEIGDEYTQVAADIQENERFIDTGSYIFNGLVSGSIF | 51 |
| | | | | GGVSSSRITAIAGESSTGKTYFSLAVVKNFLDNNPDGYCLYFDT | |
| | | | | EAAVNKGLLESRGIDMNRLVVVNVVTIEEFRSKALRAVDIYLK | |
| | | | | TSEEERKPCMFVLDSLGMLSTEKEIRDALDDKQVRDMTKSQLV | |
| | | | | KGAFRMLTLKLGQANIPLIVTNHTYDVIGSYVPTKEMGGGSGL | |
| | | | | KYAASTIIYLSKKKEKDQKEVIGNLIKAKTHKSRLSKENKEVQI | |
| | | | | RLYYDERGLDRYYGLLELGEIGGMWKNVAGRYEMNGKKIYA | |
| | | | | KEILKNPTEYFTDDIMEQLDNIAKEIIFSYGTN | |
| SR044 | SSAP | rad52 | Salmonella typhimurium, | MDLNKFDAPFNPEDIEWRIQQSGKTRDGKVWAMVLAYVTNR | 52 |
| | | | Salmonella phage | AIMKRLDDVCGKEGWRNEYRDIPNNGGVECGISIKIDSEWVTK | |
| | | | ST160, Salmonella phage ST64T | WDAAENTQVEAVKGGRSGAMKRAAVQWGIGRYLYNLEEGFA | |
| | | | (Bacteriophage ST64T) | QISSDKKQGWHRAKLKDGTGFYWLPPSLPDWAMPASCNQPSP | |
| | | | | ENTNQKSPSVDCEQILKDFSDYAATETDKKKLIERYQHDWQLL | |
| | | | | AGHDDAQTRCVQVMNIRINELKQVA | |
| SR045 | SSAP | gp2.5 | Salmonella phage SS3c | MDKCAVRDIAERDNPFEDFPEGFYFQAKNKQQPLILTSVKGEK | 53 |
| | | | | QVEPDFNIDGEQIEGEQVYSGCVANISIEIWFSEQYKVLGAKLN | |
| | | | | GIKFAGEGKAFGGSAVSASVDDLEDDEDETPRRERRRNR | |
| SRQ46 | SSAP | recT | Bacteroides caccae ATCC 43185 | MEENKLTKQENDALAIFGKGKTIYQVAGNDVALSFDIVRNYLT | 54 |
| | | | | KGNGQVSDQDIVQFISICKFNQLNPFLNEAFLVKFGQQPAQMIV | |
| | | | | SKEAFFKRADASEKYEGFKAGIIIIRDNKIVEVEGCFYNEKTDIL | |
| | | | | VGGWCEVYRSDRRFPIIAKVNLAEYDKKQSIWNEKKSTMISKI | |
| | | | | AKVQALREAFPAQLGAMYTQEEQEVKFAEYEDVTDKESKANK | |
| | | | | LAEIALKNAGVEEQPKTEQPVNQPQNNTNDKPAQKTLL | |
| SRQ47 | SSAP | ERF | Lactobacillus prophage | MEIYGKEEDRAKWAMHYAQVKANIKQPEKTHKVTVSGKTKQ | 55 |
| | | | Lj928, Lactobacillus johnsonii | GTPYSYDYNYADLNDIDAAVMDGIKKVTDKDGNVVFSYFFDI | |
| | | | (strain CNCM I-12250/La1/ | RTENNTVEVQTILVDSSGFTLKTNKVVFQNNKAWDAQATASLI | |
| | | | NCC 533) | SYAKRYSLSGAFGIAADNDDDAQDQKTIYEPKILTKQELEDYK | |
| | | | | VYYNGIQANLYDLYQEAKDGIKDAQDWLKEPHTPQDAQAVH | |
| | | | | QIAEMFKQNHSVKQETKEKQAAIDKIRQTVKKDPIEDKKVESK | |
| | | | | DPEVDKLF | |
| SR048 | SSAP | sak4 | Burkholderia phage BcepGomr | MECEMPLNWTTTANAARNGVKVLCYAPAGYGKTVLGATAPR | 56 |
| | | | | PIILSSEFGNLSIRKHNIPVLEIRNGLDMRDAYDWIMKSNEFKQH | |
| | | | | FDTLVWDGASESAETFLRVAKASGGDGRAHYGTVADMIADYF | |
| | | | | TKFRALPEKHVYITAKMGFVQDSVTGGVKYGPDFPGKQLGQQ | |
| | | | | SPYWLDEVFTLRIGTLPDGTGTYRYLQTQPDPQYDAKDRSGSL | |
| | | | | DAMSSRT | |
| SR049 | SSAP | FRF | Lactococcus phage c2 | MESKVLKLINEIKVPKSQYNSFGKYNFRNNEDIQTALKPLLLQF | 57 |
| | | | | GLMEKATTEMLEMNNELMLHVHIDIFDPDNPNDIASGDGWAV | |
| | | | | IDINKKGMDKAQATGASQSYASKYAYGQALKLDDTKDADSTN | |
| | | | | KGPNNATQMKSRPKSNYQYNLSDLKKKVANKEISSDQANELC | |
| | | | | KQGKVNMNA | |
| SR050 | SSAP | recT | Fusobacterium ulcerans 12-1B | MEVKNNLVKTEEKKNVVNFTVDGMDVKLSPAIIRSYLVNGNG | 58 |
| | | | | AVTEQEINYFIQLCKARQLNPHVKDAYLIKYGSQPATMVVSKD | |
| | | | | AIERRAIKHPQYNGKKVGIYVLDKNNELVKREHSILLEDLKLV | |
| | | | | GAWCEVYRKDWEFPAKADVNYEEYVGRKSDGTVNSQWANK | |
| | | | | PVTMLTKVAKAQALREAFIEELGGMYDSSEMSKDIPNIEEIIEAP | |
| | | | | KQDLEMKNFIEDNKEEIKDKQEKILKEAEKVEEDELIQEIFGKK | |
| SR051 | SSAP | ERF | Streptococcus phage 7201 | MEEMTFTELQQKIQLEKKKEGTAKYASRHVEDIYNVFKNLKSN | 59 |
| | | | | WNVVVNYELVEFSGKTFIKAIATASNKDEKVQAQAFAELSPVP | |
| | | | | ILKTRNGELKQMNEPQWVGAVQSYAGKYALQALFAIGEEDVD | |
| | | | | HFEVAEQSMRPNQNHNQMQSHQQANYINQQQHNQINQLIDEL | |
| | | | | AKVTGQPVETVARYYLGKYKLNNFSELLTTGFDILANDIQDKI | |
| | | | | KQRKG | |
| SR052 | SSAP | ERF | Lactobacillus prophage | MELLNQPTPPISSPQAVGLMNIQTIVGMDAKQSLDAKLSLLNDF | 60 |
| | | | Lj965, Lactobacillus johnsonii | VEMKRVLAQPSKSKDGYGYKYADLNDVLSVIQQAIGDLDLSFI | |
| | | | (strain CNCM I-12250/La1/ | QQPINKTAKTGVENYVFNSKGAILDFGSYMLDITKPQAQQYGS | |
| | | | NCC 533) | ALTYCRRYSISSIFGIASEEDTDAKALPQYMSPEEIDRLTLPYKG | |
| | | | | KQVSLAKLFSLGLAGDSKAKAKLLDRENNNVTKLAVKSMTD | |
| | | | | MWDFSKDIEAMKINEQTEIKASKDQEEKAKQAALNKVQKGKK | |
| | | | | DPFEDKKVESDSDPEVDKLF | |
| SR053 | SSAP | ERF | Clostridium phage | METNNVYIKLVNIQSTLKAPKSQFNSFGKYNYRSCEDILEGLKP | 61 |
| | | | phiC2, Peptoclostridium | ILKEEKALVILDDNIVQIGNRFYVEATATLIDAETGEKVSTKAL | |
| | | | difficile E15, Clostridium | AREDETKKGMDLAQVTGSVSSYARKYALNGLFCIDDTKDSDA | |
| | | | phage phiMMP03, | TNKHGNEQKKKEVNESELNTLYSLGESIEKDKNRVDSEVYKKF | |
| | | | Peptoclostridium difficile | GKLAVDETKQEYEKVENGYKSILEKQKQE | |
| | | | (Clostridium difficile) | | |
| SR054 | SSAP | recT | [Clostridium] methylpentosum | MEKGKQVLAEKKPEENIRLDENNIFTGFREFQVAQRMATALAS | 62 |
| | | | DSM 5476 | STIVPKDYQNNPGNCLIALEMANRLKTSPMMVMQNLYVVNGR | |
| | | | | PAWSSQYIVAMINSSRKYKTELQYEMKGSRTDGSLECTAWVE | |
| | | | | DYNGHRVTGPTVTMKMAQEEGWIGRNGSKWKTMPEVMIRYR | |
| | | | | AASFFGRLNCPDMIMGIYSEEEAIELEPSQFEFVDQVKAAEQEIK | |
| | | | | DNVGRQDIDVDVHTGEVITKPTAQTQVEEESGEPDLETQMSIEE | |
| | | | | PDF | |
| SR055 | SSAP | recT | Vibrio cholerae (strain | MEKPKLIQRFAERFSVDPNKLFDTLKATAFKQRDGSAPTNEQM | 63 |
| | | | MO10), Vibrio cholerae, | MALLVVADQVGLNPFTKEIFAFPDKQAGIIPVVGVDGWSRIINQ | |
| | | | Providencia alcalifaciens | HDQFDGMEFKTSENKVSLDGAKECPEWMECIIYRRDRSHPVKI | |
| | | | Ban1, Vibrio cholerae Ind4 | TEYLDEVYRPPFEGNGKNGPYRVDGPWQTHTKRMERHKSMIQCS | |
| | | | | RIAFGFVGIFDQDEAERIIEGQATHIVEPSVIPPEQVDDRTRG | |
| | | | | LVYKLIERAEASNAWNSALEYANEHFQGVELTFAKQEIFNAQQ | |
| | | | | QAAKALTQPLAS | |
| SR056 | SSAP | sak4 | Listeria welshimeri serovar 6b | MLEFIQSEEMKRSEVFNIMIYAKPGAGKTTTIKYLKGKTLMLD | 64 |
| | | | (strain ATCC 35897/DSM 20650/ | CDGTSKVLSGLPDITIATLNPRNPVQDMADFYGYAKTHADEYD | |
| | | | SLCC5334), Listeria phage PSA | NVVIDNLSHYQKLWLMFNGRNTKSGQPELQHVGIFDTHLIDMI | |
| | | | | SVFNNLANTNIVYTAWENTRQIQLESGQLYNQFLPDIREKVVN | |
| | | | | HVMGIVPVVARLIRNPETGQRGFLLTENNGNFAKNQLDNREFA | |
| | | | | LQEDLFKIGDIDAKA | |
| SR057 | SSAP | recT | Hydrogenobacter thermophilus | MLSKANTNTIVREEDYKKVLQMLRVALPSLAKVDDETLITAVA | 65 |
| | | | (strain DSM 6534/IAM 12695/ | YARHLGLDPLRKEVHFVPYYNKELNKTIIQPIVSYTEYLKRAER | |
| | | | TK-6) | SGKLKGWSCKFRKEGDELVAVVEIKRVDWEIPFVWEVPLSEV | |
| | | | | KRDTPLWQSHPLFMLKKTAIAQAFRMCFPEETSHLPYEEAEFW | |
| | | | | EEPSIPEQTQPTKTDVDTDTESDYITEAQRKRFFAIVKKELGYRE | |
| | | | | DAIKEILKERFGIESTAEIPKDKYEEIIDYFRSLSKPIEAEAQS | |
| SR058 | SSAP | other | Paenibacillus polymyxa (strain | MLFRRRAASAFVRKVLYFAIICGLLWLLWLGLHGVMSTGEDD | 66 |
| | | | E681) | QAVEALNEFYTMEQSGNFGGSWEFFHSQMKKKFEKSTYVQQR | |
| | | | | ARFYAGYGDGYVHV | |
| SR059 | SSAP | sak4 | Streptococcus phage Sfi21 | MRIIRAKDIQRTKNWRILIYGKAGLGKTSLIKNMPGKTLVLSLD | 67 |
| | | | | NSSKVLAGTENVDIIDFDREHPTEFITEFLTQADNLIKNYENLVI | |
| | | | | DNISSFQSDWFIEQGRKSKNGISNELQHYSQWTNYFLRVLTVIY | |
| | | | | SKPINIYVTAWEDTHELNLETGQILTQYVPQIRASVENQLLGLT | |
| | | | | DVVGRIVVNAKTGARGLILEGSEGTYAKNRLDNRTACKIEDLF | |
| | | | | KFGDLDGTKELPE | |
| SR060 | SSAP | sak4 | Lactobacillus phage phiadh | MPAFKWDEDKGTKYRWLVYGVPGVGKTTLSKYLKGKTYLLS | 68 |
| | | | | LDESFHRIDFWKGKNDIWSIDPEKPIEDLADFVKAFKPDKYDNL | |
| | | | | IIDNVSNLQKLFFIEKARETRTGLDNKMSDYNEWTTLITRFIAKC | |
| | | | | FSWNINILVTAWEAQNKVTDPSGQEFMQVGPDIRPNPRDYILG | |
| | | | | NCDVVARMVQKPQTGERGLIMQGSIDTYAKNRLDGRKGCKVE | |
| | | | | DFFEVQDK | |
| SR061 | SSAP | ERF | Mycobacterium phage PhatBacter, | MPDEAQTGPLAEDPAPHTPTVFEAWSRVMSDVQAISKDSRNEQ | 69 |
| | | | Mycobacterium phage | QHFNFRGIDAVMNVVGPALRAHGVTVIPRAVEEYSERVETQPR | |
| | | | Elph10, Mycobacterium phage | GNRPGTPMINREVRVEFTVEGPRGDWFAGTTYGEAADSGDKA | |
| | | | 244, Mycobacterium phage | MSKAHSVAYRTFLLQALTIPTDEPDPDEDVHERAPRQERRREP | |
| | | | Cjw1, Mycobacterium phage | KDEPPPLSDENAEGRAELREFCEENNLDAKVVAGKFATDNPGQ | |
| | | | Phrux, Mycobacterium phage | SIRTADNETIRAYIATMKAGLVKADV | |
| | | | Lilac, Mycobacterium phage | | |
| | | | Phaux, Mycobacterium phage | | |
| | | | Quink, Mycobacterium phage | | |
| | | | Pumpkin, Mycobacterium phage | | |
| | | | Murphy | | |
| SR062 | SSAP | recT | Cryptobacterium curtum (strain | MPQEIAKVEYTAADGQEVRLTPGVIAKYIVSGNGLASEKDIVSF | 70 |
| | | | ATCC 700683/DSM 15641/ | MARCQARGLNPLAGDAYMTVYQGKDGNTSSSVIVSKDYFVRT | |
| | | | 12-3) | ATAQDSFDGMEAGVTVLNGQGQIQKREGCEFFPSLGEKLLGG | |
| | | | | WAKVHVKDREHPSKAAVTMDEYDQHRSLWKSKPATMIRKVA | |
| | | | | IVQALREAYPGQFGGVYDRDEMPPSQEPQQVPVEVYEAPEAVE | |
| | | | | TPDNQNRATEEF | |
| SR063 | SSAP | ERF | Enterobacteria phage T1 | MHLIHQSGEVKMQLSPETNEILPALFNARNKFAKAKKDAKNN | 71 |
| | | | (Bacteriophage T1) | HLKNSVATLDAMMAAVSPALTDNDIMILQSMLDTSTETTFHLE | |
| | | | | TMLIHKSGQWAKFFMMMPIAKRDPQGVGSAMTYARRYSLAA | |
| | | | | ALGISQSDDDAQLAVKSVKDWKKELDACEDIESLKDVWANAY | |
| | | | | RQTDTASKSIIQDHYNALKAKFEIGKARGIRPAQPEQKKQVEAT | |
| | | | | SAKPVQSQSITNFE | |
| SR064 | SSAP | recT | Acinetobacter sp SH024 | MQDVDPAELANTLVNTVFKKATNDEFLSLLIVANQYKLNPFTK | 72 |
| | | | | EIYAFPAKGGGITPVVGIDGWARIINDNPVCDGIQFEQDDESCT | |
| | | | | CKIFRKDRNHPTVVTEVLSECQGNSEPWKKYPKRMERHKALIQ | |
| | | | | CARVAFGFSGIYDEDEARRIDDCHIPTVQTVSSDLPQGYEAYEQ | |
| | | | | QHLDNMRALAMEGTEALQTGYAELPQGDCKKYFWTKHSASL | |
| | | | | KEAAQHADQPQGQVYEHSPA | |
| SR065 | SSAP | other | Paenibacillus alvei DSM 29 | MQRKKLKRVMKSTNMGEDALLKTFDNFDLSDLDQRVINSYEL | 73 |
| | | | | AREYSDGLIYRIKNAKSLKGVPWFGILGTSGSGKTHLVTAAVA | |
| | | | | PLIKYDVYPLFFNWVQSFTEWFSYYNTDESYMVEEIRQRIYNCE | |
| | | | | LLVVDDICKESQKDTWIKEFYGIVDYRYRKQLPIVYTSEYFAEL | |
| | | | | IGFLSKATAGRLFERTVSPKGKKFLGEMLLNDGEDPLALDYRF | |
| | | | | KELFR | |
| SR066 | SSAP | sak4 | Lactobacillus phage Lc-Nu | MQPIKHASAIDRTKNWRVLIYGKPGVGKTSAIRNLNGKTLVLD | 74 |
| | | | | LDDSSKVLSGAPNIDVQPFDRSKPSEEWKEFLKNLAERVSGYD | |
| | | | | NLVIDNVSAFEKDWFVERGRASKNGIGNEIQDYGQWANYFARI | |
| | | | | MTMIFMDAPVNVLVTAWENTRDITSETGQSFSQYAPAIRDSVR | |
| | | | | DGLLGLTDVVGRVVVNPKTDGRGVILEGTDAIFAKNRLDNRK | |
| | | | | LVPINELFKFGNQEKSVKQED | |
| SR067 | SSAP | sak4 | Pseudomonas phage vB_Pae- | MQMSQLKPASQLARRYGVKSVVFGAPGSGKTPLINTAPRPVLL | 75 |
| | | | Kakheti25 | VTEPGMLSMRGSNVPAWEAYTPALMVEFFEWFMKSREAANF | |
| | | | | DTLGIDSISNIAEIILADELGKVKHGMKAYGNMSERVMKIANDL | |
| | | | | YYMPQKHIVMIAKQALVENGRQTILQNGEVTYEPIMQKRPFFP | |
| | | | | GKDLNVKVPHLFDNVMHLGEASVPGMPKPVRALRTKEIPEVF | |
| | | | | ARDRLGNLNELEQPDLTALFAKAMQ | |
| SR068 | SSAP | ERF | Escherichia phage Rtp | MQISELCKSILKALHTAKSLFAKAEKSKQNSHLKNKYATLEDV | 76 |
| | | | | LAAVEPGLYECGLVMFQSVLDDEQTNRMKVETKLFHVESGEW | |
| | | | | VSFLMIVPISKNDAQGYGSALTYARRYGITAALGLSQADDDGN | |
| | | | | LAAKGVKDFKRELEKCNTLDELRNVWKEAKQSLDAAGWKVF | |
| | | | | EPHIIERKAELEANAMTGFNPATPKKVAEKSSPEEKIKVESQQID | |
| | | | | TF | |
| SR069 | SSAP | recT | Streptomyces phage VWB | MIQTIAFDVGETLVSDDRYWASWADWLGAPRHTVSALVGAV | 77 |
| | | | | VAQGRDNADALRLVRPGLDVAAEYAAREAAGRGEHLDDTDL | |
| | | | | YDDVRPALAALQALGVRVIIAGNQTIRAGELLRGLDLPVDVIAT | |
| | | | | SGEWGCAKPTREFFDRVVDVAGTPRQSILYVGDHPANDTIPAA | |
| | | | | AAGLRTAHLRRGPWGHLWADDPQVRDTADWVIGSLHDLIDIV | |
| | | | | AGT | |
| SR070 | SSAP | rad52 | Paenibacillus alvei DSM 29 | MINGKTVEQVMAELAEPFPPEDIEWRVGSTNGGKTKGIALAYV | 78 |
| | | | | TNRAIMNRLDSVVGAFNWQNNYREWKGHSQLCGIGIRFGEDW | |
| | | | | IWKWDGADDSQTEAVKGGLSDSMKRAGYQWGIGRYLYKLEN | |
| | | | | VWVPIEPIGKSYRLAQTPKLPQWALPTGYTGQQTNTGNKTQRS | |
| | | | | TQKTQGKQENNSPSNNDGGSQQSSNDTGTQKRQMTEKQKQR | |
| | | | | WEVVRLLKAGGLDDAQAQAWIDKQKEQKRDYKTMLDICQRA | |
| | | | | SKR | |
| SR071 | SSAP | recT | Listeria phage B054, Listeria | MMAKENYSDPNGKLLNSITTFEVNGEEVKLSGNIIRDYLVSGN | 79 |
| | | | monocytogenes | AEVTDQEIIMFLQLCKYQKLNPFLNEAYLVKFKNTKGPDKPAQ | |
| | | | | IIVSKEAFMKRAETHEQYDGFEAGVIVERGGEIIELEGAVSLASD | |
| | | | | KLLGGWAKVFRKDRNRPVSVRISEKEFNKRQSTWNTMPLTMM | |
| | | | | RKTAVVNAMREAFPDNLGAMYTEEEQGSLQNTETSVQQEIKQ | |
| | | | | NANAEVLDIPSQQNEVPDFKEVREPEHVEMPPIYGEQQSTPPAR | |
| | | | | PY | |
| SR072 | SSAP | ERF | Mycobacterium phage Wildcat | MMRSSDNCADLLTALAKARTEIGPVEKSAQNPFFNSSYMTLDD | 80 |
| | | | | IMDAVQPVLAKNGLSVSQWPDQSVNGEPALTTLLFHEPSGQYV | |
| | | | | QATATLVLGKKDPQAEGSAITYLRRYAYVSILGIKGVEPDDDG | |
| | | | | NYASQSDKKVTRTGKVADESNASAEVTRLRKELEVAAKAAGL | |
| | | | | TSAALAKGYHDRYGADYKRDNDETHLAAALTEMQLRVKSE | |
| SR073 | SSAP | sak | Rhodothermus phage RM378 | MMNPEMKEILKKLMKPFHPDRHSYRVTGTFRTREGRNMGVV | 81 |
| | | | | AFYISSRDVMDRLDAVVGPENWRDEYEVPAPGVMKCVLYLRI | |
| | | | | GGEWVGKSDVGTGNIENPESGWKGAASDALKRAAVKWGIGR | |
| | | | | YLYALPKCYVEVDDRKRIVNEEAVKSFLHKHVTELLKNYQ | |
| SR074 | SSAP | other | Paenibacillus terrae | MIQGTLFDNEHDRPLPNRVRPQSLEDFIGQKHLLGPGKVLQDM | 82 |
| | | | (strain HPL-003) | IKNDQVSSMIFWGPPGVGKTTLAKIIANQTKSKFIDFSAVTSGIK | |
| | | | | DIRNVMKEAEGNRQLGEKTLLFIDEIHRFNKAQQDAFLPYVEKG | |
| | | | | SIILIGATTENPSFEVNSALLSRSKVFVLHQLSSEDIVELLEKAI | |
| | | | | LDPKGYGDQKIGFEDGVLSAIAEYSNGDARVALNTLEMAVLN | |
| | | | | GEKQGEAIEISKEGLLQIIHRKSLLYDKDGEEHYNIISALHKSMR | |
| | | | | NSDVNASIYWLSRMLESGEDPLFIARRLVRFASEDVGLADNRA | |
| | | | | LEITVSVFQACQFIGMPECDVHLTQAVIYLTLAPKSNSAYLAYR | |
| | | | | YAKKDALHSMSEPVPLQLRNAPTKLMKELNYGKGYQYAHDT | |
| | | | | EEKLTRMQTMPDSLIGREYYHPTTQGSESKIKQRMEEIAAWYK | |
| | | | | QNNNQK | |
| SR075 | SSAP | sak4 | Listonella phage phiHSIC | MSVLSSITKPVDRPVIMTVLGEAGLGKTSLAATFPKPIFIRTEDG | 83 |
| | | | | LQAIPEASRPDAFPMADTVESLMEQLGALVHEEHDYKTLVIDS | |
| | | | | VTQLETMFTQHVIDNDPKKPKSIQQANGGYGSGLSAVAALHG | |
| | | | | RVRKAAKMLNDKGMHIVFIAHADTETIELPDQDPYMRYSLRL | |
| | | | | GKKSMSHYVDNVDLVGLVKLQMFLKGDDDKRKKAISTGQRVI | |
| | | | | TATTSASSVTKNRYGITQDLPCELGVNPFINHIPSLTE | |
| SR076 | SSAP | sak4 | Staphylococcus phage Pv1108 | MSEEQDILQELGIEEINEDTQNYYSIMVYGKSGTGKTTLATREN | 84 |
| | | | | NAFIIDIHEDGTQVTRQGFVKRVDNYIAFRNTITSIESIVNTARQ | |
| | | | | RGKLLDVVVIETAQKLRDITLTHVMNTHQVKKARIQDYGETSK | |
| | | | | LIVNSIRHLLKVKDKLGFHVVLTGHEGLNSEDKDENGKIINPRIS | |
| | | | | IEVQPAIHNNLVTQFDIIGHTFIEDHTDENGNATHNYVESVEPSN | |
| | | | | LYTTKVRHNPQITINNPGIKNASISKIIDMAQNGN | |
| SR077 | SSAP | sak | Mycobacterium phage Hamulus, | MSEPDVEGLAKLREPFPPNQIGKLPKGGITLDFLGHGYLTARFL | 85 |
| | | | Mycobacterium phage Dante, | DVDPLWTWEPFAVGDNGLPLLDEHGGLWIRLTLCGVTRIGYG | |
| | | | Mycobacterium phage | DAGGKKGPNAVKEAIGDALRNAGMRFGAALDLWCKGDPDAP | |
| | | | Ardmore, Mycobacterium phage | APPDPAVAERNALLHELGDACAALTLDEKTVAAQFYGKYKVT | |
| | | | Llij, Mycobacterium phage Drago, | ARNAKPAQLREFIDDLMENGAPA | |
| | | | Mycobacterium phage Phatniss, | | |
| | | | Mycobacterium phage Spartacus, | | |
| | | | Mycobacterium phage Boomer, | | |
| | | | Mycobacterium phage SiSi, | | |
| | | | Mycobacterium phage PMC, | | |
| | | | Mycobacterium phage Ovechkin, | | |
| | | | Mycobacterium phage Ramsey, | | |
| | | | Mycobacterium phage Fruitloop, | | |
| | | | Mycobacterium phage SG4 | | |
| SR078 | SSAP | recT | Bacillus subtilis subsp | MSEQNELMTKSVEFSVHGEPVKLTGKTVKNFLVRGNSDVTDQ | 86 |
| | | | spizizenii (strain TU-B-10), | EAAMFINLCKYQKLNPFLNEAYLVKFKGSPAQMIVGKEAFMK | |
| | | | Jeotgalibacillus marinus | RAENNEQFQGFKAGIIVEREGKMVDLEGAIKLSNDKLIGGWAE | |
| | | | | VYRADRQQPISVRISLEEFSKGQSTWKSMPLNMIRKTAIVNALR | |
| | | | | EAFPNSLGNLYTEEEEQANDDILAEDRVRREVNENANTEIIDVN | |
| | | | | PILEPEPETTQAGQPEPQPIKRESQDKPSIFESGPDF | |
| SR079 | SSAP | recT | Paenibacillus lactis 154 | MSSQQLALVKRDTVDVVADKVRQFQERGEIHEPANYSPENAM | 87 |
| | | | | KSAWLLLQTVQTKDYKPALEVCSRDSIANALLDMVVQGLNPA | |
| | | | | KKQGYFIVYGKTLTFQRSYFGTMAVTKRVTGAEDIDAQIIYEG | |
| | | | | DEFEFEIVRGRKKITKHKPSFSNMDDSKIAGAYCTIYWPDGREY | |
| | | | | TEVMTMKEIRQAWKKSKQNPDKENSTHNEFPGEMAKRTVINR | |
| | | | | TCKTYMNTSDDGSLIMKHFKRQDEVLAEAEVEAEIAANANGE | |
| | | | | VIDITPPATTEAEPEPEQPKETTRSSKSNVELAGQGEMDFEIHPD | |
| | | | | DIPPFGTEGPDE | |
| SR080 | SSAP | recT | Pediococcus acidilactici DSM | MSNELMTKAVTYEVNNEEVKLSGQIVKQYLTSGQAVTDQEVT | 88 |
| | | | 20284 | MFIQLCRYQHLNPFLNEAYLVKENGKPAQIITSKEAFMKRAESN | |
| | | | | PNYAGLKAGCIVERNGELIYTEGAFTLKTDNILGAWADVIRKD | |
| | | | | RREPTHVEISMDEFSKSQATWKSMPATMIRKTAIVNALREAFP | |
| | | | | QDLGALYTEDDKNPNEATQTTYKQEPEVNTTKTADVLAKKFS | |
| | | | | GAPQIKSVENVQESEEESNNASNHGEATEPVNNVEEPTATAEV | |
| | | | | EQGQLL | |
| SR081 | SSAP | ERF | Enterobacteria phage HK022 | MSKEFYARLAAIQENLNAPKNQYNSFGKYKYRSCEDILEGVKP | 89 |
| | | | (Bacteriophage HK022) | LLNGLFLSISDEVVLIGDRYYVKATATITDGENSHTATALAREE | |
| | | | | ESKKGMDSAQVTGATSSYARKYCLNGLFGIDDAKDADTDEHK | |
| | | | | HQQNAAAKQSNPSPTPEQVLKAFTDAAMQKNTVEELKQAFAK | |
| | | | | AWKMLEGTPEQHKAQDVYNIRRDELEGAAA | |
| SR082 | SSAP | rad52 | Homo sapiens (Human) | MSGTEEAILGGRDSHPAAGGGSVLCFGQCQYTAEEYQAIQKAL | 90 |
| | | | | RQRLGPEYISSRMAGGGQKVCYIEGHRVINLANEMFGYNGWA | |
| | | | | HSITQQNVDFVDLNNGKFYVGVCAFVRVQLKDGSYHEDVGYG | |
| | | | | VSEGLKSKALSLEKARKEAVTDGLKRALRSFGNALGNCILDKD | |
| | | | | YLRSLNKLPRQLPLEVDLTKAKRQDLEPSVEEARYNSCRPNMA | |
| | | | | LGHPQLQQVTSPSRPSHAVIPADQDCSSRSLSSSAVESEATHQR | |
| | | | | KLRQKQLQQQFRERMEKQQVRVSTPSAEKSEAAPPAPPVTHST | |
| | | | | PVTVSEPLLEKDFLAGVTQELIKTLEDNSEKWAVTPDAGDGVV | |
| | | | | KPSSRADPAQTSDTLALNNQMVTQNRTPHSVCHQKPQAKSGS | |
| | | | | WDLQTYSADQRTTGNWESHRKSQDMKKRKYDPS | |
| SR083 | SSAP | recT | Burkholderia cenocepacia (strain | MSDVITTNQDTAPGAFDLSPRSLEQAMQLANILADSSIVPKDFI | 91 |
| | | | ATCC BAA-245/DSM 16553/ | GKPGNVLVAIQWGMELGLKPMQAMQNIAVINGRPSLWGDAL | |
| | | | LMG 16656/NCTC 13227/ | LALVLASPVCEYVHEWEENGTAFIKVKRRGKPEDVQSFGDED | |
| | | | J2315/CF5610) (Burkholderia | AKKAGLIGKQGPWAQYPQRMKKMRARAFALRDNFADVLKGI | |
| | | | cepacia (strain | AVAEEVMDIEPVERDITPRATAAQIAHSAADSSRPARTERHDEI | |
| | | | J2315)), Burkholderia cenocepacia | VKKLEDVARNLGFEPFKEEWTKLSRDDRAALGLRERDRIAAIA | |
| | | | BC7 | GAPVVHQQTDGAPQDDGHGAGQREPGGDDE | |
| SR084 | SSAP | recT | Photorhabdus luminescens subsp | MSTAVQKVYEIINPLKTEFEQICSEPGIVFKRESEFAMQIFANND | 92 |
| | | | laumondii (strain DSM 15139/ | FLATTALNNPVSARSAVMNIAAIGISLNPAQKLAYLVPRNKSVC | |
| | | | CIP105565/TT01) | LDISYMGLMHIAQQSGAIKWCQSAVVRKNDIFKRTSIDTAPIHE | |
| | | | | YNEFDTAQSRGDIVGAYTVIKTDDCDYITHTMRASAIFDIRDRS | |
| | | | | SAWIAYKTKGKSCPWVTDEEQMILKTVVKQAAKYWPRRERL | |
| | | | | DKAIDYVNTEAGEGIDFSKGQNSVIDVTPAADSTIESITNLLTTM | |
| | | | | NKTWDDDLLPLCSKIFRRQILSPAELTESEAIKASDFLRKKAS | |
| SR085 | SSAP | recT | Bacillus thuringiensis | MSTALATLAGKLAERVGMDSVDPQELITTLRQTAFKGDASDA | 93 |
| | | | Sbt003, Escherichia coli\′BL21- | QFIALLIVANQYGLNPWTKEIYAFPDKQNGIVPVVGVDGWSRII | |
| | | | Gold(DE3)pLysS | NENQQFDGMDFEQDNESCTCRIYRKDRNHPICVTEWMDECRR | |
| | | | AG\′, Enterobacteria phage | EPFKTREGREITGPWQSHPKRMLRHKAMIQCARLAFGFAGIYD | |
| | | | HK630, Enterobacteria phage | KDEAERIVENTAYTAERQPERDITPVNDETMQEINTLLIALDKT | |
| | | | lambda (Bacteriophage | WDDDLLPLCSQIFRRDIRASSELTQAEAVKALGFLKQKAAEQK | |
| | | | lambda), Escherichia coli | VAA | |
| | | | TA280, Escherichia coli 1-176- | | |
| | | | 05_S3_C2, Escherichia coli 40967 | | |
| SR086 | SSAP | recT | Listeria phage A118 | MSTNDELKNKLANKQNGGQVASAQSLGLKGLLEAPTMRKKFE | 94 |
| | | | (Bacteriophage A118) | SVLDKKAPQFLTSLLNLYNGDDYLQKTDPMTVVTSAMVAATL | |
| | | | | DLPIDKNLGYAWIVPYKGRAQFQLGYKGYIQLALRTGQYKSIN | |
| | | | | VIEVRDGELLKWNRLTEEIELDLDNNTSEKVIGYCGYFQLINGF | |
| | | | | EKTVYWTRKEIEAHKKKFSKSDFGWKKDYDAMAKKTVLRNM | |
| | | | | LSKWGILSIDMQTAVTEDEAEPRERKDVTEDESIPDIIDAPITP | |
| | | | | SDTLEAGSEVQGSMI | |
| SR087 | SSAP | ERF | Streptococcus pyogenes serotype | MRKSESITEYAKAFCKAQLEVKQPLKDKDNPFFKSKYVPLENV | 95 |
| | | | M28 (strain | TEAITKAFANNGISFSQDPTTNAENGYIDVATLVMHTSGEWVE | |
| | | | MGAS6180), Streptococcus | YGPLSVKPTKNDVQGAGSAITYAKRYALSAIFGITSDQDDDGN | |
| | | | pyogenes, Temperate phage | EASKPNKTNQSQKPTNKTSKGASFQTPKISNIQVETYKSDLSDI | |
| | | | phiNIH11, Streptococcus pyogenes | AKATNQNVEELTKWLTDTLKVKTLEDLRTEQIVSTDNLINKLK | |
| | | | serotype M2 (strain | KKAEQKND | |
| | | | MGAS10270), Streptococcus | | |
| | | | pyogenes serotype M3 (strain | | |
| | | | ATCC BAA-595/ | | |
| | | | MGAS315), Streptococcus | | |
| | | | pyogenes STAB902 | | |
| SR088 | SSAP | sak4 | Staphylococcus phage phill | MTEKTNQDVDILTQLGVKDISKQNANKFYKFAIYGKFGTGKTT | 96 |
| | | | (Bacteriophage phi- | FLTKDNNALVLDINEDGTTVTEDGAVVQIKNYKHFSAVIKMLP | |
| | | | 11), Staphylococcus phage | KIIEQLRENGKQIDVVVIETIQKLRDITMDDIMDGKSKKPTFND | |
| | | | 80, Staphylococcus phage | WGECATRIVSIYRYISKLQEHYQFHLAISGHEGINKDKDDEGSTI | |
| | | | 52A, Staphylococcus aureus | NPTITIEAQDQIKKAVISQSDVLARMTIEEHEQDGEKTYQYVLN | |
| | | | (strain NCTC 8325) | AEPSNLFETKIRHSSNIKINNKRFINPSINDVVQAIRNGN | |
| SR089 | SSAP | rad52 | Pseudomonas aeruginosa, | ATGACTAACATGAATTCAAATATGGCTATCTGGGATCAAGT | 97 |
| | | | Pseudomonas aeruginosa | GAAAGAGACAGATACCAGATATACCAGACAAGCTAAGCTCA | |
| | | | DHS0, Pseudomonas phage | ATGGCCAGGACATGACATCCATCAACGGACTCTATATAGTT | |
| | | | LKA5, Pseudomonas phage F116 | CGCCGCGCTACAGAATTATTTGGTCCAGTTGGCAAAGGTTG | |
| | | | | GGGTTGGAAAGTCCTCGTAGAACGTTTTGACGAAGGGGCCC | |
| | | | | CGCATTTAGACAAGAATGGTGCGGTTATTTGTCACGATAAA | |
| | | | | ACACATACCTTGTATATAGAATTGTGGTACCGTCATGATGGA | |
| | | | | ACAATTAACCATGCTAGGCAGTATGGGCATACCCCGTACGT | |
| | | | | CTATAAAACTGAGTGGGGTTTCAAAACGGATCACGATTATG | |
| | | | | GGAAAAAATCGCTCACAGATGCGATTAAAAAGTGCCTGAGT | |
| | | | | TTGCTCGGTTTTTCTGCGGATATCCACATGGGTATGTTCGAC | |
| | | | | GATACAACGTATGTTGAGGGTCTGAAATTAAAAGAGAGATT | |
| | | | | AGCTGATGCTGGTGATCCGGAGACTGCTTTAGATGAAGCCA | |
| | | | | AAGACGAGTTTAAAACTTGGCTTCGTGCCCAGTTAGATGCC | |
| | | | | ATTGCTGCTGCTCCGAATAGCCGTGCTTTAGAACTAATGCGC | |
| | | | | AAACAGGTGGCCGAAAAAGCTAGAGCCAAAGCCCCTGTAGT | |
| | | | | TAATTTCAATCCGAGCGAAATTGAGCTGAGAGTGAATGAGG | |
| | | | | CGGCGGATGAGAGGCTAAGACAGCTATCTCCCGCCCCGACG | |
| | | | | AGCCCGGAAGAGTAA | |
| SR090 | SSAP | sak | Staphylococcus phage CNPH82 | MTEETLFNQLNQKDVNDHVEKKNGLTYLAWSVAHQELKKIDS | 98 |
| | | | | NYSIKTHEFVHPDVPQDNYFVPYLATPEGYFVQVSVTVKGQTE | |
| | | | | TEWLPVLDFRNKSLAKGSATTFDINKAQKRCFVKAAALHGLG | |
| | | | | LYIYNGEEVPSANDNDITELEERINQFVTLSQEKGRDATLDKTM | |
| | | | | RWLGIQNINKVTKKDIANAHQKLDAGLKQLDKENSND | |
| SR091 | SSAP | gp2.5 | Streptococcus pyogenes | MTTTPNTTKVVTGKVRLSYVALLEPKAFEGQEAKYSTVILIPKT | 99 |
| | | | STAB902, Streptococcus | DKVTIKKIKDAQKAAYEAAKDNKLKGVKWERVKTTLRDGDE | |
| | | | pyogenes, Streptococcus | EMDTEEHPEYTGHMFMSVSSKTKPQIIDKYKNFVDSAEEVYSG | |
| | | | pyogenes serotype M3 (strain | VYARVSLNAYAYNTAGNKGISCGLNNVQIVAKGDYLGGRSSA | |
| | | | ATCC BAA-595/MGAS315) | DADFDEWNEEEDEDDIL | |
| SR092 | SSAP | other | Paenibacillus curdlanolyticus | MTNMQHMMKQVKKMQEQMLKAQEELGTKTIEGSAGGGVVN | 100 |
| | | | YK9 | VKVNGHKQVLSITIKPEVVDPEDIEMLQDLVITAVNDALAKAE | |
| | | | | EMANEDMGKYTGGMKIPGLF | |
| SR093 | SSAP | recT | Streptococcus phage | MTNNQLATQTKRNITTDPSLLTGADIKKYFDPQNLLTEKQVGQ | 101 |
| | | | V22, Streptococcus pneumoniae | ALALCKGRNLNPFANEVYIVAYTNRNGGKEFSLIVSKEAFLKR | |
| | | | | AAQCKDYEGFEAGVVVVDSEGVMHERKGAIMLPEDTLIGGW | |
| | | | | ARVHRKNFKVPVEIFVSREEYDKKQSTWNTMPATMIRKVALV | |
| | | | | NALREAFPEDLGNMYTEDDGGETFDRIKDVTPQESREDVVARK | |
| | | | | MAEIEQFNKEQEANHADPEPAQNEDPIQGELLDGELEY | |
| SR094 | SSAP | recT | Cyanophage PSS2 | MTEQHAQRWDERTKKIVFATVAKDVRSEADKAHFEHLCTSKG | 102 |
| | | | | LDPLAKEIWCVARGGKPTFMLSIDGFLKLANSTGMLDGIDIEFF | |
| | | | | DADGKGSEVWVSSKPPAACVARAYRKNCSRPFSASCRFDAYA | |
| | | | | QNSPLWKKLPEVMLSKVATTLALRRGFSDVLSGLHSPEEMDQ | |
| | | | | AGMAPAEALAPSAPAAPAPVVNPPAEKPRKRMAPVEPVHEVID | |
| | | | | RPTDDLHHGGVTEVQKNVAPKAVAVMEKPVEEGLPARDDLK | |
| | | | | GAISKLYEVARAKGLTVKGWESLGLQMGGLTPGSAAKFLTPM | |
| | | | | SSISEEKVGYLNSGKSTTGEALR | |
| SR095 | SSAP | recT | Vibrio cholerae 1587 | MTQVIPFEQQYPLVAQRGIDEATWSALQNSVYPGAKPESILMV | 103 |
| | | | | VDYCRARSLDPILKPVHIVPMSVKNSQTNQNEWRDVVMPGIG | |
| | | | | MYRIQADRSKTYAGSTEPEFGPPITMEFHGEGNAKETITEPEWC | |
| | | | | KITVYKLINGSPVAFSAKEMWLENYATAGRNSQIPNAMWKKR | |
| | | | | QYAQLAKCTEAQALRKAWPEIGQQATAEEMEGKELIIEHDITP | |
| | | | | AKKSAPQIQQYPQDDFDKNFPAWEKKIKLGTNTPERIIAMVQS | |
| | | | | RGQLTDEMKQRLFDASAINGELSHANSN | |
| SR096 | SSAP | recT | Haemophilus | MTTALNTLTQKLAERFEMGSSENLPQTLMATAFKGQNVTPDQ | 104 |
| | | | paraphrohaemolyticus HK411 | MVALLVVANQYELNPWTNEIYAFPNKEGIIPIVGVDGWVAIIN | |
| | | | | KHPQFDGIEFEQDAESCTCRIYRKDRQRPTVVTEYLDECKRETD | |
| | | | | PWRKYPKRMLRHKAAIQCARVAFSLSGIYEPDEAERIQESDKTS | |
| | | | | QNITPEKSATTGNPTHPEFEALVFTLEEEAKKGTSHLETYWKTT | |
| | | | | LTKEQRQIVGVNEITRIKEKAKQYDNIQEAEYEEA | |
| SR097 | SSAP | recT | Bartonella schoenbuchensis | MTTSIVATVAQKYGLSEQEFCKKIIKNCINFNISKEDFEDFVYL | 105 |
| | | | (strain DSM 13525/NCTC 13165/R1) | ADGYKLNPLRKEIYAVPKRGGGIDAVVGIKGWYKLIRSQDDYD | |
| | | | | GIDIIYQHDNNGKLHAAQCIIYLKSKKYPIKFTEFLEECRRDTE | |
| | | | | HWRKSSSRMLCYKAITQCARLAFGFDDIYDEDEVDCIDEAFISE | |
| | | | | VNHNPQNERVSDEVLAQIRELMEQTKTEEKKVLSFAKVASLTEM | |
| | | | | SHETGQIILEGLKERQRFQMEEEQQTLPSPKQPHTPTQQDLPGV | |
| SR098 | SSAP | ERF | Phormidium phage Pf-WMP3 | MTNNITPDFIKAFVKVQSELPAIPKSSTNPHFKSKFASLDTFNE | 106 |
| | | | | LVLPVLHTYGFTLMQPCSVENDNAVIDTYLMHESGGYVVSRYLI | |
| | | | | GFDDNPQKQGARVTYGRRYAAFAILGVVGDEDDDGNSAVGLS | |
| | | | | GTKQTSAEPVATLKRSGGERKLQ | |
| SR099 | SSAP | recT | Simkania negevensis (strain | MTVQLVQPRNSDEYDFDQTKLDLIKRTICKGATNDELQLFIHA | 107 |
| | | | ATCC VR-1471/Z) | CKRTGLDPFMRQIFAVKRWDSSTKKEIMTIQTGIDGYRLIADRT | |
| | | | | GKYAPGKDTEFGYDNKGNIRWAKAYIKKMTPDGQWHEISAIA | |
| | | | | FWEEYVQTTREGKSTLFWLKKSHIMLSKCTEALAERKTFPAER | |
| | | | | SGIYTKEEMAQEFSPLEEHLVERIAASRNDQGRS | |
| SR100 | SSAP | sak | Lactobacillus phage | MTDKKKSVYETLAKVDVKPLLEKKGNLNYLSWAKAWGLVKS | 108 |
| | | | KC5a, Lactobacillus | LYPDATYQIKEEPEYVLTKESWLATGRNVDYRQTIAGTEVEVT | |
| | | | phage phi jlb1 | VTIEDQSYSSKLYVMDYRNKVIAKPTYFEINKTQMRCLVKALA | |
| | | | | FAGLGLDVYAGEDLPEQPQRKQTVPKPAQKPARRQATLSKPK | |
| | | | | KMTKDQLYGYQADYNGEKKFLVTIYTECDKQKKMGLDAKTS | |
| | | | | VPIEWWHEKLKENSADGEAVRQFTEMAIAANKKKQANGIPDY | |
| | | | | AKDPEVEKAIEDAIS | |
| SR101 | SSAP | rad52 | Thermus phage phiYS40 | MTEKEIRIELMRPFPDQAILFRVDKKLKNGSYLIVPYLDVRVII | 109 |
| | | | | HRLNTMIPGDWELKTEITPITVETTDKSGFLIVGHMAKAELTIM | |
| | | | | GKTMTGTGSSYLVFDNDLEKLKKQFIKADPKSAETDAIRRAAAN | |
| | | | | HSIGLYIWFFKNQIFATEEELKNRNSKPIQEALANERIIGDKLY | |
| | | | | RQAKEYALGKRGGAE | |
| SR102 | SSAP | recT | Streptococcus gallolyticus | MTTNEITQQKGGYLTDLQQLDGATLRNFVDPKHQASPQELQTL | 110 |
| | | | subsp gallolyticus TX20005 | LAIVKNRNLNPFTKEVYFIKYGNNPAQIVVSKDAFMKRAEQNP | |
| | | | | NYDGFESGVIYENQTGELKSKKGVILPKNCKEVGGWCEVYRK | |
| | | | | DRSRPVYREVELSAYNTGKNWWGKAPGQMIEKVAIVAAVRD | |
| | | | | TFSEDVGGLYTTDEMEQAAPIDVTPQETQEDVIARKQAQIENW | |
| | | | | QNQKAQQEEAQAEPAQEEQTELLDENGELVY | |
| SR103 | SSAP | recT | Acinetobacter radioresistens | MNAVTQVENQLGLSLKDYDVDQAMWSALTSSIFPGAKPESIV | 111 |
| | | | SK82 | MAVEYCKARNLDIMKKPCHIVPMSVKDAKTGNSDWRDVIMPSI | |
| | | | | AEHRITASRSHSYAGIDAPVFGPMVNISFGGVSHTVPEFCTVT | |
| | | | | VYRIIHGEKVAFAHTEYFEEACATVKGGGLNSMWTKRKRGQLA | |
| | | | | KCAEAGALRKAFPEEIGDGYTKEEMEGKIITVGGTEHIQEEAKA | |
| | | | | IEDIRPTLTEKQIETAIKKIKANQGSLDALKAHYNITPEQENYV | |
| | | | | RAQTEVLEHDPV | |
| SR104 | SSAP | recT | Acinetobacter sp P8-3-8 | MNAPIQHSTIVTAQITQMADLLGLGNVDPVELKNTLIATAFNN | 112 |
| | | | | GDKEISDAQMASLLIVAGQYKLNPWTKEIYAFPDKNKGIIPVVG | |
| | | | | VDGWSRIVNSSPNFDGLEFKYSENMVTMEGAKVAAPEWVDCII | |
| | | | | YRKDRERPTVVREYLAECYRPPFKGKYGDVVGPWQSHPSRFL | |
| | | | | RHKATIQCARLAFGFVGIYDQDEAERIQDGGTVRTVQGETGDL | |
| | | | | IPDGYQEFEEAHLNNMRELAFEGMEALETGYAELPKGKCRSHF | |
| | | | | WTMHKESLKAAAQKADQPQGEVYEHSPAE | |
| SR105 | SSAP | recT | Lactobacillus ruminis SPM0211 | MNQLQKQQTRSITFKANGDDVTLSPSIVRDYLVRGNSKEVTGQ | 113 |
| | | | | EIAMFLNLCKFQHLNPFLNEAFIVKFGDKPAQLITSKEAFMKRA | |
| | | | | ESHPQYNGLKAGVIVVNNNGVEFRNGAFTVPDFDQLVGGWCE | |
| | | | | VYRKDRDIPVRVEISLSEFSKGQSTWKTMPATMIRKTAIVNALR | |
| | | | | EAFPETLGALYTEDDDGQMQMQQTKKQVQATENSKAKNKAD | |
| | | | | ALIAQAMDPEHVQQQETEEFQREPRPVDLFNPAEEYSKGE | |
| SR106 | SSAP | sak | Bacillus phage 0305phi8-36 | MNINECFQVSHYEVDKNLRKLIDEPVNEDLIDKNKYANNSEEV | 114 |
| | | | | PDSIYKRVLNKATNYQWSFVPYDISTVEGKYVQFIGLLIVPGYG | |
| | | | | VHTGIGTQKLQKTDNSNALSAAKTYAFKNACKEMGIAPNVGN | |
| | | | | DDFDEALFENFDDDEIEVEEKPKKKPVKKEEKKPAKKPAKKEA | |
| | | | | KPLKERIEEIRQAYELDDDDEVAFIQIWDENIIDLKDMDDKKWK | |
| | | | | AFLQDVEENPEEYEDF | |
| SR107 | SSAP | ERF | Staphylococcus phage 92 | MNKSETVVEINKAMVAFRKEVKQPEKDKNNPFFKSKYVPLEN | 115 |
| | | | | VVEAIDEAATPHGLSYTQWALNDVDGRVGVATMLMHESGEYI | |
| | | | | EYDPVFMNAEKNTPQGAGSLISYLKRYSLSAIFGITSDQDDDGN | |
| | | | | EASGKNNNPKQQTRTQWASSETIGILRKEVIDFTKLIKGTDKEA | |
| | | | | PQNIVEQKFDINNYKLTEKQAAEAIQKIRNNTKTVTGGKQ | |
| SR108 | SSAP | sak4 | Lactobacillus phage phig1e | MKFYEDGNIPEIPNMYFIYGDGGTGKTSVVKQFVGHKLLFSFD | 116 |
| | | | | MSSNVLIGDKDVDVIMFEHRDMPNIQAMVEQYVMQGIQDVKY | |
| | | | | RIIVLDNITALQNLVLENIDDAAKDNRQNYQKLQLWFRDLGTIL | |
| | | | | KESGKTVYATAHQLDNGSSGLSGEGRYQADMNEKTFNAFTSM | |
| | | | | FDLVGRIYLTGGERMIDLDPEKGNHAKNRIDGRKLIKANELIQT | |
| | | | | SKGAK | |
| SR109 | SSAP | recT | Bacillus phage 0305phi8-36 | MKSRELTPEFKKEFIMKIGGPKGKEAILYNGLLALAHEDPRFGH | 117 |
| | | | | IEAYVTQYPSSENKFTCYARAEIFDKEGKRIGMEEADASVNNC | |
| | | | | GKMTAASFPRMALTRAKGRAFRDFLNVGMVTADELQAYEPD | |
| | | | | LASVDSIGKIKRLGKKLGFSRTQLEDFLYDNIGTDKMNELTEPE | |
| | | | | AQEIIDAMNAELADQEPDEEVEEKPARKKRPAKKKSASVDDED | |
| | | | | F | |
| SR110 | SSAP | gp2.5 | Staphylococcus phage | MKAKVLNKTKVITGKVRASYAHIFEPHSMQEGQEAKYSISLIIP | 118 |
| | | | 3A, Staphylococcus phage | KSDTSTIKAIEQAIEAAKEEGKVSKFGGKVPANLKLPLRDGDTE | |
| | | | phi7401PVL, Streptococcus | REDDVNYQDAYFINASSKQAPGIIDQNKIRLTDSGTIVSGDYIRA | |
| | | | pneumoniae, Staphylococcus | SINLFPFNTNGNKGIAVGLNNIQLVEKGEPLGGASAAEDDFDEL | |
| | | | aureus (strain NCTC | DTDDEDFL | |
| | | | 8325), Staphylococcus phage | | |
| | | | Phi12, Staphylococcus aureus, | | |
| | | | Staphylococcus phage 47, | | |
| | | | Staphylococcus phage tp310-2 | | |
| SR111 | SSAP | ERF | Flavobacterium phage 11b | MKEIATALVKAQKEMTTPKKGSVNPFFKNKYADLNDVLAAIV | 119 |
| | | | | PALNNNGIVLLQPLVNIEGKNFVKTVLMHESGEVFESLAEIFCN | |
| | | | | KNNDAQAYGSGVSYARRYSLSSICGIGSEDDDAHTAVNTKPKA | |
| | | | | VPVVLTLTDAVIDSVIAKGIDTIKSCLESIKNGSRIATQVQILK | |
| | | | | LENGSK | |
| SR112 | SSAP | gp2.5 | Acyrthosiphon pisum secondary | MKIKLNNVRLAFPELFEPTQVSGQGAFKYRANFLIPKSRTDLIE | 120 |
| | | | endosymbiont phage 1 | EIKAGIKHVIGEKWGNKDIEKIYNSICNNPNRFCLRDGDSKEYD | |
| | | | (BacteriophageAPSE-1) | GYAGNLYLSASNKSRPLVIDRNTSPLTAQDGRPYSGCYVNATV | |
| | | | | EFYGYDNNGKGVSASLRGVQFFRDGDAFTGGGVASVEEFDDL | |
| | | | | SMAEEEELLAS | |
| SR113 | SSAP | sak4 | Streptococcus phage | MKITKATEIKNNDSCYLIYGNPGFGKTSTAKYLPGKTIVINIDK | 121 |
| | | | A25, Streptococcus pyogenes, | SAKVLRGNENIDIADIDTHKIWGEWLDTVKELLNGAANDYDNIV | |
| | | | Streptococcus pyogenes serotype | IDNVSELFRACLANLGREGKNHRVPSQADYQRVDFTILDSLRA | |
| | | | M2 (strain | LLQLNKRIVFLAWETSDQWTDENGMIYNRAMPDIRTKILNNFL | |
| | | | MGAS10270), Streptococcus | GLTDVVARLVKKTTDDGEEVRGFILQPSASVYAKNRLDDRKG | |
| | | | pyogenes serotype M4 (strain | CKVEELFETT | |
| | | | MGAS10750), Streptococcus | | |
| | | | pyogenes serotype M3 (strain | | |
| | | | ATCC BAA-595/ | | |
| | | | MGAS315), Streptococcus | | |
| | | | pyogenes GA06023, Streptococcus | | |
| | | | pyogenes STAB902 | | |
| SR114 | SSAP | gp2.5 | Prochlorococcus phage P-55P7 | MKNIHVTKEPVTLEGYQAILKPSKFGYSLKAVVGSDIVDALETE | 122 |
| | | | | RADCLKWAESKLKNPKRATLKPTPWEEVEEGKFIVKFSWAED | |
| | | | | KRPPVVDTEGTPITNEDVPVYEGSKVKIGFHQKPYILRDGVTYG | |
| | | | | TSLKLSGIQVVSIQSGAGVDTGDEDQDGVAELFGKTQGFKADD | |
| | | | | PNVTPAEEAPVPDDDF | |
| SR115 | SSAP | sak4 | Lactobacillus phage phij11 | MKKIVNFTDGANIFVVLGQVGSGKTHLTLGHKGKKLVISFDGS | 123 |
| | | | | YSTLEGHEDEMTVVEPEITDYGNPDKLVSEIDDLAKGCDLVVF | |
| | | | | DNISAVETSLVDAITDGKLGNNTDGRAAYGVVQKLMAKFARW | |
| | | | | AIHFNGDVLFTLWSEVTEEGKEKPAMNAKAFNSVAGYAKLVS | |
| | | | | RTETGEDGYTVVVNPDNRGVIKNRLADKIKKQSIKNDDYWKA | |
| | | | | VEFAKGSKHENA | |
| SR116 | SSAP | recT | Komagataeibacter oboediens | MNALTVQGHTPAIQITSFEQLVKFADIASRSGMVPSAYSGKPQA | 124 |
| | | | | VLIAVQMGSELGLAPMQSLQNIAVINGRPSVWGDALLGLVKAS | |
| | | | | AVCDDVVETMEGEGDALTAICVAKRKGKSPVEARFSVEDAKA | |
| | | | | AGLWNKQGPWKQYPKRMLQMRARGFALRDAFPDVLRGLITA | |
| | | | | EEAGDIPQDDFRSSVSGQRPVDVTPQVRHVEQERAPNYIAYFES | |
| | | | | KLADCRNTTSVDALWKQWNDRIEKAHSAGRPIAQETIERVQE | |
| | | | | MMGERMGEVEQAERQQTEELAAAPVEEPVA | |
| SR117 | SSAP | rad52 | Saccharomyces cerevisiae (strain | MNEIMDMDEKKPVFGNHSEDIQTKLDKKLGPEYISKRVGFGTS | 125 |
| | | | ATCC 204508/S288c) (Baker\s | RIAYIEGWRVINLANQIFGYNGWSTEVKSVVIDFLDERQGKESI | |
| | | | yeast), Saccharomyces cerevisiae | GCTAIVRVTLTSGTYREDIGYGTVENERRKPAAFERAKKSAVT | |
| | | | YJM1250, Saccharomyces | DALKRSLRGFGNALGNCLYDKDFLAKIDKVKFDPPDFDENNLF | |
| | | | cerevisiae YJM451 | RPTDEISESSRTNTLHENQEQQQYPNKRRQLTKVTNTNPDSTKN | |
| | | | | LVKIENTVSRGTPMMAAPAEANSKNSSNKDTDLKSLDASKQD | |
| | | | | QDDLLDDSLMFSDDFQDDDLINMGNTNSNVLTTEKDPVVAKQ | |
| | | | | SPTASSNPEAEQITFVTAKAATSVQNERYIGEESIFDPKYQAQSI | |
| | | | | RHTVDQTTSKHIPASVLKDKTMTTARDSVYEKFAPKGKQLSM | |
| | | | | KNNDKELGPHMLEGAGNQVPRETTPIKTNATAFPPAAAPRFAP | |
| | | | | PSKVVHPNGNGAVPAVPQQRSTRREVGRPKINPLHARKPT | |
| SR118 | SSAP | recT | Clostridium botulinum (strain | MNENKELTEQQGANIANDLDTFGSIKGFENTCRMAKALASSTI | 126 |
| | | | Eklund 17B/Type B) | VPKEYHDNIGNCLIALDVANRVGLSPIMVMQNLYVVNGRPAW | |
| | | | | GSQSISALINTSKKYAKPLQYKIDGSGDELSCYAYTFDHEENEIK | |
| | | | | GPVITIKMAKEEGWINKSGSKWKTMPEVMIRYRAASFFGRLHC | |
| | | | | SELLLGIYSADEAVELEPATVIEVTHEEVKQEIKENANQEIIDI | |
| | | | | QIEEVKEDDKEKSKNENPTVKQTVVKTEPF | |
| SR119 | SSAP | recT | Campylobacter coli 80352 | MNTKITNTQNQAVSTSFTQEKIELIRKHFFPVNAKTVEMEYCLN | 127 |
| | | | | IANKYNLDPFLKQIFFVPRRSQVEVNGKKEWVDKIDPLVGRDG | |
| | | | | FLAIAHKTGKFGGIRSYSEIKQFPRLNDNGKWEYIQDLVAVCEV | |
| | | | | HRTDSDKPFVVEVAYNEYVQKKASGEATSFWTTKPDTMLKKV | |
| | | | | AESQALRKAFNLSGLYSAEEMGVGMT | |
| SR120 | SSAP | recT | Helicobacter pullorum MIT 98- | MNKEIINKENNQVALADAENLAFIKKQFFPVNATEKDIEFCLKV | 128 |
| | | | 5489 | AQAYSLNPVLREIFFVERMANVNGAWVVKVEPLVSRDGLLSIA | |
| | | | | HKSGKLSGIKSESFLKETPVLINGEWEIKKDLCAVANVYRTDTK | |
| | | | | EVFSAEVFYSEYAQKTKEGKITKFWAEKPHTMLKKVAESQAL | |
| | | | | RKAFNINGIYTPEELDGIKSVGGDVKTLSGVDLEVEADIDEPEIF | |
| | | | | YELDSTPAEADSEKKAVEALGLSVEEKNGYLKIMGNTYKKEA | |
| | | | | HIKALGYTLHKASSGENIWIKKLA | |
| SR121 | SSAP | ERF | Escherichia phage Tls | MKFSEQNANVIKALFEARQLFTKVKKDKQNTHLKNKYATLDS | 129 |
| | | | | VLDAIMPGLTDKGLFLTQDQKVGEDLKSMTVLTRFIHVESNEW | |
| | | | | VEYSFTLPMQKLDPQGGGSTNSYARRYALCTALGLATADDDA | |
| | | | | NLATKNAQDWKKDLDACDNLTDLQETFKTAYKQSDAANRRII | |
| | | | | KEHYDKLKAKMEIGKARGFNPAEPAANVAKNEKVEKEPQQEV | |
| | | | | KSQSITDFE | |
| SR122 | SSAP | gp2.5 | Bordetella bronchiseptica | MKLKLNNVRLAFPVLFEAKTVNGEGKPAFSASFLIDPSDAQVK | 130 |
| | | | (Alcaligenes bronchisepticus) | ALNQAIEQVAKEKWGAKADAVLKQMRAQDKVCLHDGDLKA | |
| | | | | NYDGFPGNLYVSARSATRPLVIDKDRSPLAEADGKPYAGCYVN | |
| | | | | ASIELWAQDNNYGKRVNAGLRGVQFLRDGDAFAGGGVASED | |
| | | | | EFDDITEGAAAADLV | |
| SR123 | SSAP | ERF | Lactococcus phage LL-H | MKMQHSDSIKEIFGALSKFRAQVKQPAKTANNPVFNSKYVTLE | 131 |
| | | | (Lactococcus delbrueckii | GVMQAIDAALPGTGLAYSQLVENGDNGASVSTLITHSSGEWMI | |
| | | | bacteriophage LL-H) | VGPLTLNPTKRDPQGQGSAITYAKRYQLASAFGISSDIDDDGNA | |
| | | | | GTFGEDSRWQSGYQRSRPKTTHTEAKTLTKAITLASSLAHHSK | |
| | | | | PKSGP | |
| SR124 | SSAP | ERF | Listeria phage A500 | MKMSESVLELSVALSKFQEKVEQPAKTANNPFFKSSYVPLENV | 132 |
| | | | (Bacteriophage A500) | ISAVKKHAPDLGLSYIQIPLTEENKVGVKTILMHSSGEFVEFDPF | |
| | | | | MLPLDKNTAQGAGSALTYARRYTLSSAFGIASDEDDDGNGAS | |
| | | | | GNTKANKSSKNYQQTKQTQPTQQSDNLASPAQRKAIFAKASV | |
| | | | | VGDPFGHDAKYVLESYKITDTKSMSKGEASALIKKEDAEIEAQ | |
| | | | | KQVN | |
| SR125 | SSAP | recT | Acinetobacter radioresistens | TTKEWKWNERARKSLPEEKVHTVKLRNITCKAWAIETATGER | 133 |
| | | | SK82 | LESAEISMEMAVKEGWYQKNGSKWQTMPEQMLRYRAASFFG | |
| | | | | RIYAPEVLMGIRTQEEEQDAIIDVTPEPVQQTSPVTTSDLKANV | |
| | | | | VKEAPVEQQAKQQPVQEEKKPRARKQPKVIETENVQNSTENE | |
| | | | | VVDAELTVEDLKRLQQEAENLIQQNKTSETAQVDVNKFAEIKK | |
| | | | | SYMKTLTSTVQASSINGLKSQIEKE | |
| Strep01 | SSAP | recT | Streptomyces longwoodensis | MSLTTLKERVQQRAAAASSDGIPPGQADEDTPAGRDHDAEQFR | 134 |
| | | | | ADIAAALPAHVSVDRFLAVFRPVLPGLRKCTPASVRQAVITAA | |
| | | | | RFGLLPDGEEAVITADDGIATFLATYHGYIELMWRSGMVKSIV | |
| | | | | AKVVYDGDEWDYVPTAPVGQDFTHRPKLGSPKDRTPLFAYTF | |
| | | | | AWLDGGARSDVAIVTVEEAEAIRDEFSKAYQRAEANGQKNSL | |
| | | | | WHTRFPDMLLKTAIRRAAKLLPKSAELRALVAVERAADEGHT | |
| | | | | QILAALTPEALALEAEARAAARAAEASQDVPPPRLPVKRGRAR | |
| | | | | PRRRHRDKNKATRR | |
| Strep02 | SSAP | recT | Streptomyces albus | MSQISNALATRDQGPAAQIEQYRDEYAALVPSHVNADQWVRL | 135 |
| | | | | AVGAVRGDEKLMEAAQNDIGLFLREMKTAARLGLEPGTEQFY | |
| | | | | LTPRKSKPHGGRKVIKGIVGYQGIVELIYRAGAASTVIVEAVRE | |
| | | | | NDTFRYVPGRDDRPVHEIDWFANDRGPLVGVYAYAVMKDGA | |
| | | | | VSKVVVLNRSRVMEFKAKSDSKHSEYSPWNTNEEAMWLKSA | |
| | | | | VRQLAKWVPTSAEYRRDQLLAHTETADSVVASVSTAPLPPQPS | |
| | | | | ALDDADPDDDGPIDAELVD | |
| Strep03 | SSAP | recT | Streptomyces noursei ATCC | MTSPIRAAVARRAGDPAALISQYTADFAAVEPSHIKPATFVRLA | 136 |
| | | | 11455 | QGILRRDEKLAQAAANDPGQFMSVLLDAARLGLEPGTEAYYL | |
| | | | | VPFKGRVQGIVGWQGEIELMYRAGAISSVIVETVREDDVFVWT | |
| | | | | PGLVDRETPPRWEGPMSYPFHEVEWAGDRGPLRLVYAYAVM | |
| | | | | KGGATSKVVVLNAQDIERAKKTSQGADSPSSPWRQHEAAMWS | |
| | | | | KTAVHRLAKYVPTSAEYITAQVRAVRQADALSAPPVEEVVDV | |
| | | | | ELVGDGQEQEARR | |
| Strep04 | SSAP | recT | Streptomyces albulus | MNNPSEEPSVDGAPTAQRPGGENASPDQAVTPSAIILRAEQTEF | 137 |
| | | | | DHRQRMALALISPELKKASRPELAVFFHHCVRSGLDPFARQIY | |
| | | | | MIGRKNKGRDREENPITWTIQTGIDGFRTIAHRAAERTGERISYE | |
| | | | | DTVYYAADGTTSDVWLADEPPAAVKVTVLRGTSRFPLVARW | |
| | | | | AEFAPEHWDNKQGKYVVAAMWKQMPAHMLRKCAEAGSLR | |
| | | | | MAAPQDLSGVYADEEMEQADAEVVAGEAKEASSRLRAAAGL | |
| | | | | DDAHSEAESNAEVEEPEAPTPKKSRPKPATEASTQSEGSKRPRK | |
| | | | | RTAGKRAANKAADSGAGG | |
| Strep05 | SSAP | recT | Streptomyces rimosus subsp | MSQISNAIATRDTGPAAQIEQYRDEYAALVPSHINADQWIRLAV | 138 |
| | | | pseudoverticillatus | GAIRGNKDLEKAARTDVGIFLRELKTAARLGLEPGTEQFYLTPR | |
| | | | | KSKAHGVALIIKGIVGYQGIVELIYRAGAVSSVIVETVREHDTFS | |
| | | | | YVPGRDERPVHEIDWFGADRGALVGVYAYAVMKDGATSKVV | |
| | | | | VLNRARVMEIKAKSDSKDSEYSPWKTSEEAMWLKSAVRQLAK | |
| | | | | WVPTSAEYMREQLRAQAEVAAETPSVASAPLPPQPSALDDYDP | |
| | | | | ADDGPIEGELVD | |
| Strep06 | SSAP | recT | Streptomyces cyaneogriseus | MSQIGNAIEKRDQGPAAQIEQYRDEYAALVPSHVNADQWIRLA | 139 |
| | | | subsp noncyanogenus | VGAIRGNKDLEQAARNDVGVFLRELKTAARLGLEPGTEQFYLT | |
| | | | | PRKSKAHGYKLIIKGIVGYQGIVELIYRAGAVSTVIVKAVRERD | |
| | | | | TERYVPGRDDRPIHEIDWFGTDRGPLVGVYAYAVMKDGAVSK | |
| | | | | VVVLNRTRVMEIRAKSDSKDSEYSPWQTNEEAMWLKSAVRQL | |
| | | | | AKWVPTSAEYMREQLRAQAEVAGELAAPSVMGAPAMPQPSV | |
| | | | | LDDTDPDDEPIDGELVD | |
| Strep07 | SSAP | recT | Streptomyces sp HPH0547 | MSSQISNAIATRDNGPTAQLKQYRDEYAALVPSHINLDQWIRL | 140 |
| | | | | ATGALRGDEKLMEAAQNDVGVYLREMKTAARLGLEPGTEQF | |
| | | | | YLTPRKSKAHDGRPIIKGIVGYQGIIELIYRAGAVSSVVVEAVRR | |
| | | | | ADTFHYVPGRDERPIHEIDWFNDDRGPLVGVYAVAVMKDGAT | |
| | | | | SKVVVLNKRQVMEAKAKSDSRNSQYSPWQTNEEAMWLKTAV | |
| | | | | RRLAKWVPTSAEYMREQLRAAKEVAAEPTPDAPSLPPVQAAP | |
| | | | | LDDVDPDTGEVLEGELLDEPSTT | |
| PF001 | SSAP | recT | Hungatella hathewayi DSM 13479 | MDELTLNQPVTSLSSGVFSSAESFQELFNIGKMFSASTLVPQAY | 141 |
| | | | | QGKPMDCTIAVDMANRMGVSPMMVMQNLYVVKGKPSWSGQ | |
| | | | | ACMSMIRASKEFKNVRLVYTGDKGTDSWGCYVQAEHRETGEP | |
| | | | | VKGTEVTIKMAKEEDWYGKTGSKWKTMPEQMLAYRAAAFFA | |
| | | | | RVYIPNSLMGLHVEGEAEDITNESEIPEIPDIFGEKEKEAQV | |
| PF002 | SSAP | recT | Ureaplasma urealyticum serovar | MVKDDKLVPSIRLLTPNELSEQWANPNSEINQITRAVLTIQGIDL | 142 |
| | | | 10 (strain ATCC 33699/ | KAIDLNQAAQIIYFCQANNLNPLNKEVYLIQMGNRLAPIVGIHT | |
| | | | Western), Ureaplasma | MTERAYRTERLVGIVQSYNDVNKSAKTILTIRSPGLKGLGTVEA | |
| | | | urealyticum serovar 7 str ATCC | EVFLSEYSTNKNLWLTKPITMLKKVSLAHALRLSGLLAFKGDT | |
| | | | 27819, Ureaplasma parvum | PYIYEEMQQGEAVPNKKMFTPPVAEVIEPAVENIKKVDFNEF | |
| | | | serovar 3 (strain ATCC | | |
| | | | 700970), Ureaplasma urealyticum | | |
| | | | serovar 8 str ATCC | | |
| | | | 27618, Ureaplasma urealyticum | | |
| | | | serovar 4 str ATCC 27816 | | |
| PF003 | SSAP | recT | Clostridium sp FS41 | MAENEKQALLQEENKSENVVSTVKRTALATNPFSDTDQFNNIF | 143 |
| | | | | KMAQLISQSDMIPATYKGKPMNCVIALEQANRMGVSPLMVMQ | |
| | | | | NLYVVKGVPSWSGQGCMMIIQGCGKFRDVDYVYSGEKGTDSR | |
| | | | | SCKVVATRISDGKRIEGTEITMQMVKSEGWISNTKWKNMPEQ | |
| | | | | MLGYRAATFFARMYCPNELNGFATEGEAEDMNHKPQRIEAIN | |
| | | | | VLGDTAHE | |
| PF005 | SSAP | recT | Clostridium sp CAG:470 | MSNEVQKNNELMVKFDIDGNEIKLTPSIVQEYIVGTDAKITNQE | 144 |
| | | | | FKLFTELCKVRKLNPFLREAYLIKYKAGVPAQLVVGKDAILKR | |
| | | | | AVLNPNYDGMESGIIVQKEDGSVEERQGTFRLGNEQLVGGWA | |
| | | | | RVFRKDWTHPTYSSVSFNEVAQKTGQGQLNSNWGSKGATMV | |
| | | | | EKVAKVRALRETFVEDLAGMYEAEEMQQEISQQEPIEVQAEIE | |
| | | | | EQTENTKEVSMNEL | |
| PF006 | SSAP | recT | Coriobacteriales bacterium | MASKNEAIEVSPAEIASVKEKPASIVKAEKAKKEPCALVKYEDAE | 145 |
| | | | DNF00809 | GREVVLTREDIINTISSNPRITDKEIKEFIELARAQKLNPFTREI | |
| | | | | FITKYGDYPATFIVGKDVFTKRAQSNPLFKGMQAGIIVQRGNA | |
| | | | | VDQREGSATFGDEMLIGGWCKVYVQGYDVPIYDSVSFNEYAA | |
| | | | | RKTDGTLNAMWASKPATMIRKVAIVHALREAFPSDEQGLYDQ | |
| | | | | SEMGLSGQGGE | |
| PF007 | SSAP | recT | Paeniclostridium sordellii | MSKLKSALQSKEAKGDGLTVSKSYAMKQLTIKMKNDIKEALP | 146 |
| | | | (Clostridium sordellii) | SHFCIDNFQKSAINTYNLDKSLQECEATTFISAMIECAKEGLEPN | |
| | | | | NILGQAYLVPVCVDGVNKVEFQIGYKGLIELAYRSGKIKSLYA | |
| | | | | NEVFEKDEFHIDYGLDQKLIHKPFLGGDRGEVIGYVAVYQMDN | |
| | | | | RGASFVFMTRDEILGHSKKYSRSFGCDLWESEFDAMAKKTVIK | |
| | | | | KLLKYAPLSIELQKSVSIDESVKGVGCI | |
| PF008 | SSAP | recT | Streptococcus infantis SK970 | MTNNQLSTQQTKRDISVNALDWTFEDIKRYFDPQNLLTEKQVG | 147 |
| | | | | QALSLIKGRNLNPLANEVYIVAYKNRNGGTEFSLIVSKEAFLKR | |
| | | | | AAQSKNYEGFEAGVVAVDKDGVMHERKGALMLPGDTLVGG | |
| | | | | WARVYRKNFKVPVEIQVSLEEYNKKQSTWNSMPATMIRKTAL | |
| | | | | VNALREAFPEDLGNMYTEDDGGETFDRIKDVTPQESREDVVAR | |
| | | | | KMAQIEQFNKEQAHTDPEPTQNEEPIQGELLDGELEY | |
| PF009 | SSAP | recT | Leptotrichia goodfellowii F0264 | MGRLTQNEANDKLIIFKVGNDEVKLSNNIVKRYLVTGQGNVT | 148 |
| | | | | DEEIMYFMKLCKARNLNPFVRDAYLIKYSDKDAATIVVAKDAI | |
| | | | | EKRAIQHPKYNGKEVGLYIIKKETGDLEKRNGTIYLKEKEEIAG | |
| | | | | AWCTVYRKDWDNPVTVEVNFDEYVGRKKDGTANINWANRP | |
| | | | | VTMITKVAKAQALREAFIEEISGMYEAEEAGINVNDLDDTPIEQ | |
| | | | | KDMQNMPDVTNTVQETEIDDEDLKKELFDNENKKNPLE | |
| PF010 | SSAP | recT | Lactobacillus rossiae DSM 15814 | MAVVKRLKGVKSIEAYVVRQGNDFDVASEGEQVVVTKWQM | 149 |
| | | | | HVADLDKPIAYAVCVIEKEDGTKSFTIMTKKQIDVSWSHAKTT | |
| | | | | KVQREYPDEMAKRTVINRAAKLFINTSDDSDLFVQAVNDTTSD | |
| | | | | EYDNDSRKDVTPSAESKGTQDLLDGFQSSNQSQQPSATSQSSQ | |
| | | | | PVSTATSAEKSANPSAESAVTSKTAKPSSTAEDIINGYEQSQSSK | |
| | | | | GADTVDEDGHNVVIDHEDEEPDVHQGDIFNQHDNPQS | |
| PF011 | SSAP | recT | Paenibacillus sp FSL R7-0331 | MTIAIETQVQETLDRILDSKHDALPSDFNKKRFSENCKVYVFDD | 150 |
| | | | | KDLHKYTADEIAANLFKGAVLGLDFLAKECHLISGGVDLKFQT | |
| | | | | DYKGEMKLTKKYSIRPLLDVYAKNVREGDEFREEVIEGRQVIH | |
| | | | | FAPRPFNTSKIIGSFAVAFFHDGGMVCESIPAGEIEEIRKNYGKA | |
| | | | | LGDAWDKSQGEMYKRTVLRRLCKTIETDFDAEQRLVYDAGG | |
| | | | | AFEFTKQPARSRQQSPFNPPEESEVIQNDRAAETDQG | |
| PF012 | SSAP | recT | Nocardia terpenica | MSEISKAVATQQNPLAVVARYKRELGTVLPTVLRQDPDRWLM | 151 |
| | | | | AAENAARKNPDIMAVTKADQGASYMRALVECARLGHEPGSK | |
| | | | | DEHFIKRGNAISGEESYRGIIKRVLNSGFYRSVVARTVFSNDTYS | |
| | | | | FDPLTDIVPNHVPAQGDRGKPLSAYAFAVHWDGTPSTVAEATP | |
| | | | | ERIATAKAKSFASDKPTSPWQLPTGVMYRKTAIRELEPYVHVA | |
| | | | | PEPQPRRHLDGTVGGIPATDFDVDDGDVLDITADQLAEAGEIV | |
| PF014 | SSAP | recT | Dermabacter sp HFH0086 | MSNALTITQDQTEFTPKQLSVLENLGVQGAAPQEVAMFFDYCQ | 152 |
| | | | | RTGLSPWARQIYMIGRWDRNLGRKKYAVQVSIDGQRLVAERS | |
| | | | | GVYEGQTAPQWCGPDGQWVDVWLANEPPQAARVGVWRKSF | |
| | | | | REPAYGVARLSSYMPVTRDGKPQGLWGTMPDVMLAKCAESL | |
| | | | | ALRKAFPLELSGLYTSEEMQQADAPRTEPAPVDEDVVDAEIVD | |
| | | | | DEERMQWVEAIQAAETTDVLRKMWADIKTCPDALQAELRELI | |
| | | | | PARAKELAA | |
| PF015 | SSAP | recT | Leifsonia xyli subsp xyli, | MAVKKNPTIEDYLIKVEPEFQRALGASMDAAKFAQDALTAIKQ | 153 |
| | | | Leifsonia xyli subsp xyli | NPKIGHSDPRSLFGALFLAAQLKLPVGGPLAQFHLTTRTVKGNL | |
| | | | (strain CTCB07) | TVVPIVGYGGYVQLIMNTGLYSRVSAFLIHAGDYFVTGANSER | |
| | | | | GEFYDFRRADSDRGEVKGVIAYAKVKGHNESSWVYIDAETMR | |
| | | | | AKHRPKYWESTPWADDAGEMFKKTGIRVLQKYLPKSVESLNV | |
| | | | | ALAASADQAIVRKVDGVPDLDIQHDRDTETVAVPEQPVSVPQP | |
| | | | | GDET | |
| PF017 | SSAP | recT | Lactobacillus shenzhenensis | MSAVSESKDLQHVDQLSVLNSAMTAASLNLPINQNLGFFYLVP | 154 |
| | | | LY-73 | YKGIAQAQMGYKGYIQLAQRSGQYQRLNAIPVYADEFGSWNP | |
| | | | | LTEELDYTPHFEDRKASDKPVGYVGFFKLANGFEKTVYWSRK | |
| | | | | QIEAHRDRFSKSSKSSASPWNTDFDAMALKTVLRNLITKWGPM | |
| | | | | TTDIQRANDADEGDYKNDLSTDTSEPKDVTPGASLEQFLGETD | |
| | | | | QQQKPATKPAPKKKAEEAKPNDLKPDVTHDPNEHTEQTSLSD | |
| | | | | DDLPFD | |
| PF018 | SSAP | recT | Pseudoalteromonas lipolytica | MSLSLQEYQNLLYGKLTACKGQFDAYLSENGYKLDFNTELNY | 155 |
| | | | SCSIO 04301 | VYQIVMSGLNVEYSFPYTPVESVISSFLKAAKIGLSLCPTEQLCE | |
| | | | | LKTEYSESSGQYVTQLGLGYKGILKLAYRSGKVKQINANVFYE | |
| | | | | KDTFQYNGVNSKVTHTTTVLSKAMRGQLAGGYCQTELIDGSF | |
| | | | | KTTVMPPEEILAIEEQGKVMGNEAWLSVHVDQMREKTLIKRH | |
| | | | | WKTLCPCIVRDSVMNDPMLFDDQDCQHSSNQQAYEEQFESAY | |
| | | | | SREAY | |
| PF019 | SSAP | recT | Acetobacter orientalis 21F-2 | MSNAVATHNPVLQPNNFQELIGFAKMAAASDLMPKDYKGKPE | 156 |
| | | | | NIMIAVQMGSELGLAPMQAIQNIAVINGRPSVWGDAMLALVR | |
| | | | | GSGKCSSVKEIFEGDGDNLAAVCVVRRVDGDEVRGEFSVADA | |
| | | | | KRANLWSKQGPWQQYPRRMLQMRARGFALRDAFPDVLRGLI | |
| | | | | GAEEAQDIPADPIDVTPRHRHVEPPKTIDHKQIFSDRLEGCPDAL | |
| | | | | SVDNQWTVWESTIQKAFDAGRPIPEAVQDAVRDMIAAKRAEF | |
| | | | | DRQATEAPIEEPVA | |
| PF020 | SSAP | recT | Collinsella stercoris DSM 13279 | MNQIVKFTDDSGLAVQVTPDDVRRYICENATEKEVGLFLQLCQ | 157 |
| | | | | TQRLNPFVKDAYLVKYGGAPASMITSYQVFNRRACRDANYDG | |
| | | | | IKSGVVVLRDGDVVHKRGAACYKKAGEELIGGWAEVRFKDG | |
| | | | | RETAYAEVALDDYSTGKSNWAKMPGVMIEKCAKAAAWRLAF | |
| | | | | PDTFQGMYAAEEMDQAQQPEQVRAQAEQPVDLQPIRELFKPY | |
| | | | | CEHFGITPAEGMTAVCGAVGAEGMHSMTEQQARRARAWMEE | |
| | | | | EMAAPAVEAEYEVVDEGEVF | |
| PF021 | SSAP | recT | Lactobacillus capillatus DSM | MANEVAEKNEVVYLAGNEEVKLKPSTVRDFLTSGNGNITSQE | 158 |
| | | | 19910 | AFMFIKLCEYQHLNPFLNEAYLIKFGNKPAQIITSKEAFMKRAE | |
| | | | | SHPAYNGVKAGLIVLRNSDVKYTKGAFKLPTDKILGAWAEVN | |
| | | | | RKDRDEPHHIEISMEEFSKQQSTWKSMPATMIRKTAIVNALREA | |
| | | | | FPETLGGMYTEDDKNPNEAVKESEPVDDKAESVVDDLVKDIKP | |
| | | | | KNEPAEKEGEPKESEQYEEQETTFEEVNSKEAEKDGDSNSEEQ | |
| | | | | TSLFKGATIQPNV | |
| PF022 | SSAP | recT | Treponema socranskii subsp | MNEIIKKEATEIITPVDEKTIMEYLDTTGLTKSLLPKEKAMFVN | 159 |
| | | | socranskii VPI DR56BR1116 = | MARLYGLNPFKREIYCTVYGEGQYRQCSIVTGYEVYLKRAERI | |
| | | | ATCC 35536 | GKLDGWQAQITGSLQDGTLAATVTIWRKDWTHPFTHTAFYTE | |
| | | | | CVQTSKKTGEPNAIWRKMPSFMVRKVAIAQAFRLCFSDEFGG | |
| | | | | MPYTNDEMGVDAPKERDITHEATATIADEAEAPSAEVKNEPKP | |
| | | | | ADVVQQLETLLMKYESQLSGKPYELAEEALRTGSDAEVIAMY | |
| | | | | ERVVSYLKRKGIQVGK | |
| PF023 | SSAP | recT | Bifidobacterium magnum | MTSSTLVPSTLEEQKTYAELVAQSTGMVPAAYQGKPANIFVAI | 160 |
| | | | | QVGSSLGLEPMASLQGINVIQGKPTLSAQAMLGLLKSQHFKVH | |
| | | | | ITKDDENQRVTVEVIDPDDPDYSTVSVWDMAKARKAGLGGDQ | |
| | | | | YWTKQPMTMLKWRAVSEAAREAAPHLFLGLGGAYTKEELEE | |
| | | | | SVTVENVEETPRPRSPYSSYTRKPEPVEPEVVEAEPVEPEPINL | |
| | | | | IIQTMRENGVDTAQKARLVLTQIVGVENVNDIPADKLETLCANL | |
| | | | | DGFAHDIQQTLGDNK | |
| PF024 | SSAP | recT | Frateuria aurantia (strain ATCC | MSEISVARAQNLAQIERVNALLPTSIGEAMQLAEFMAKSDLLPP | 161 |
| | | | 33424/DSM 6220/NBRC 3245/ | HLKGRQGDCLLVVMQAQRWGMDALSVAQCTSVVHGRLCYE | |
| | | | NCIMB13370) (Acetobacter | GKLVAAALYSQKAIDGRLHYEISGHGQDASIVVTGTPRGTGQT | |
| | | | aurantius) | QSVSGSVRKWRTITMKKQDGAPPKRVDNAWDTIPEDMLVYRG | |
| | | | | TRQWARRYAPEVMLGVQTPDEVDDTPMQTTVIHSTAASSPAIE | |
| | | | | PLIPYPEEEFSKNFDTWLGRIQCGRNSAEEVIAKLQTKYTLTPG | |
| | | | | QLGAIRDLETTEAEVVE | |
| PF025 | SSAP | recT | Parcubacteria bacterium 32_520 | MKKETTQNKAKKITKKASSKKKETKKIVVKEQQITDPALLTKA | 162 |
| | | | | KIDLIKRTVAKGATDDELQMFLTVAARAGLDPFTKQIHLVKRH | |
| | | | | STAEGRDIATIQTGIDGYRAIAEKTGKYGGSDDATFTFADGQDK | |
| | | | | IPTSATVKVYKIIGDKVIEIKATAYWDEFAPTNEKLAFMWRKM | |
| | | | | PKLMLAKCAEALALRKAFPNVLSGIYTHEEMEQLDEEKNVND | |
| | | | | KKATLANSKAYIVSAKSLDELKGFRERIEKSKIDKATKEKLLKY | |
| | | | | CQEKEVELSAIEAEIESV | |
| PF026 | SSAP | recT | Helicobacter sp MIT 05-5294 | MNEVAKLNESRASNQKMIATILESDSSHKKLNDFFAGDSAKVQRF | 163 |
| | | | | KSSLINIAGNSILSSCSPASIIRSAFSLAEIGLDINQTLKQSYVL | |
| | | | | KYGIEAEPVISYKGWQSILEKVGKKSRAFCVFKCDTFNIDFSTFE | |
| | | | | GNLTFVPNYAQRDETNRKWFNDNLLGVVVLIKDKDASEIVNF | |
| | | | | VSAKKIDKIKGCSPSVKKGRNSPYDEWFEEMYLAKAIKYVLSK | |
| | | | | QALTEKEETIARAIDIENEVEAKIQKEASNYEIKDLEELMQDKE | |
| | | | | VMAMTLDAEEGIPQI | |
| PF027 | SSAP | recT | Mycobacterium brisbanense | MTETAVAKPEQRPTTISQVLQVMIPELTRAIPKGMDADRLARIV | 164 |
| | | | | QTEIRKSRNAKAAGITRQSLDDCTQESFAGALLTASALGLEPGI | |
| | | | | NGECYLVPYRDTRRRVVECQLIIGYQGIVKLFWQHPRARGIKT | |
| | | | | DWVGANDHFEYEDGENTVLVHRKAADRGEPIAFWAVVKVAD | |
| | | | | ADPLVTVLTADEVKELRKGKVGSSGDIKDVQHWMERKTVLK | |
| | | | | QGLKLAPKTTRLDAAIVNDDRAGTDLSRSQALMLPPGVQSTAD | |
| | | | | YIDGTVDEEPQGYEEIAETEAQVQ | |
| PF028 | SSAP | recT | Capnocytophaga sp oral taxon 338 | MSAITQTTDKRLGNFLNQANTADFLTKTLGARKSEFVSNLLAIS | 165 |
| | | | str F0234 | DADKNLSQCDPSEVMKCAMNATALNLPLSKNLGYAVVIPYKD | |
| | | | | WKTQEVHPQFQIGYKGFVQLAIRSGQYRTINTCEVREGEIKRN | |
| | | | | KFTGHTEFLGENPEGKVIGYLAYIELQNGFQQSLYMTLEQVQE | |
| | | | | HVSKYSKSGIDKDTKEFKGIWRNEFDTMAKKTVLKELLNRFGV | |
| | | | | LSVEMQQAIEKDQADSEGRYIDNPQGGRYVQDAVIIEQSEPTEV | |
| | | | | VSQEEPSPAPTKGIKQVDFKQM | |
| PF029 | SSAP | recT | Salinisphaera hydrothermalis | MTNGASNQGRSGGQKKLIERIGDKYGVDANKMLSTLTATAFR | 166 |
| | | | C41B8 | QKNDQPITNEQMMALLVVADQYNLNPFTKEIYAFPDKNAGIVP | |
| | | | | IVGVDGWSRIINEHDSEDGMDFEASDEFIELDKHHKKCPEYITC | |
| | | | | RMYRKDRSRPVEITEYLDEVYRPPFMKNGNPMIGPWQSHTKRF | |
| | | | | LRHKAMIQCARLAFGFVGIFDQDEAERIVQGEVVSSERNGAAP | |
| | | | | PARQTEAPAAAERTLNDQQQNQVQAAIEESGADKAGLLKQLG | |
| | | | | VASIDQIPVTRFSLVMDRINAQTEDA | |
| PF030 | SSAP | recT | Candidatus Cloacimonas sp SDB | MQSLAVAKNESLMPLSFQEKLSMASVFIKSNLMPRGYDTPEKV | 167 |
| | | | | VIALEMGHELGLPPLVAIMNIAIINGTPTLKADMMVALALRSGK | |
| | | | | IEDIKIQYSGKENMNDNQFKCKVTIRRRGVETPFKASFSRQDAK | |
| | | | | VAGLDYKDNWKKYERRMLKHRAMAFCIRDALPEIFAGVYLPE | |
| | | | | ELEGIESYGGNRNTVILPAAQIEKTASNIEDNTADESLPSKVTDS | |
| | | | | QIKALKELSERLFNEGIVTSYIYDQYAVNRIEDLDQGKAGKLIL | |
| | | | | LLQNEPGKISEWIEDTYQKTA | |
| PF031 | SSAP | recT | Elusimicrobium minutum (strain | MTTENIQRTPALGILLEQAPFYSKAQNLEQKKIEDMMVSFAVIA | 168 |
| | | | Pei191) | HKVIKRHQDKGRGEVDVQSIKEAFKCSMDTGIPVDNRRLAYLT | |
| | | | | IVKNNSTGKYEIQYEPGYMGFVHKERQIKPGAVVQTILLWEKD | |
| | | | | VFTYKSTTGVAEYSYVPEKPMRSDFNHIIGGFCVISYFEHGREY | |
| | | | | SFVTPMTKAELDLARGKAKTQDVWGVWPGEMYKKVIIKRAG | |
| | | | | KVEFIGEPEMEKLNEIDDRSYTGFERKQPAKVDYSAVKPLPQEI | |
| | | | | TETEALPAPGGDDTVQDVFSMEEPQ | |
| PF033 | SSAP | recT | Spiroplasma kunkelii CR2-3x | MNNKIELIENNSKVNNWINEKLTNQKEINLFRKNILTIYNNNPN | 169 |
| | | | | LFDKEKINLMSVLSACVKAMLLDLPLDPNLGYAYIVPYNGKGQ | |
| | | | | LQIGYKGYIQLAIRTGKYLTINAIEVKQGELLNFDELEQEYNFK | |
| | | | | WITNENERTKKETIGYVAFFKLLNGYKKTLYWSKEKCENHFKT | |
| | | | | YSKNYQTYGKFTVGSYEGMALKTVETQLLRKWGIMSVEMQE | |
| | | | | VYQHDQAIIINNSKEFSDNPNIKNKEDKNVIELNNKKDELNLNL | |
| | | | | EQEFSINEINDDEEIAKTVDEMFSD | |
| PF034 | SSAP | recT | Avibacterium paragallinarum | MLKTAKPESIFNAACMAATLNLPLQNGLGFAYLVPFRTKRKVP | 170 |
| | | | JF4211 | LVDTEGNVILDRDGKPRTKEEYVIEAQFQIGYKGFIQLAQRSGQ | |
| | | | | FKRLVALPVYKKQLVKKDFINGFEFDWEQEPEEGELPIGYYAY | |
| | | | | FKLVNDFSAELYMTHEEIEKHAKKYSQTYRTYLEKKAKGQWA | |
| | | | | SSVWADNFESMALKTVMKLLLSKQAPLSVEMQNAVLADQSVI | |
| | | | | KDSENGEFDYPDNNIDDAEIVTMNVSQETFEQCKQNILNRETTL | |
| | | | | QALCDSGFKFSPEQYAQLEALENNRE | |
| PF035 | SSAP | recT | Endozoicomonas montiporae, | MPKATAKKSPATQVVDTAEKPATIKDLLRNNKNTIAQALENTP | 171 |
| | | | Endozoicomonas montiporae CL- | LTPERLLSVCMTEIRKTPKLRECSQASLVGSIIQSAQLGLEPGSA | |
| | | | 33 | LGHCYLIPFWNNKERSLECQFMLGYRGMLALARRSGSIVSIDA | |
| | | | | RVVYAADEFSLLYGTITEIIHKPKETGEKGGVVGVYAVAQLQG | |
| | | | | GGTQVDFMPVEDILKIRDSSKGVQSGKDTPWKTHFEEMAKKT | |
| | | | | VVRRLFKFLPVSVEALTAVGLDEKAEAGQSQCNEALIQEGDGG | |
| | | | | VLVDMDTGEIIEGKVTSAADLNRAL | |
| PF036 | SSAP | recT | Roseateles depolymerans | MSEIAPVNQTAIAANTDLGNPSAFLFDSERMTALMEFSNLMSR | 172 |
| | | | | GSVTVPKHLQGKPADCMAITLQAMRWRMDPYIVGSKTHLVN | |
| | | | | GNLGYEAQLVVAVLKNSGAVKGRPHYEFRGEGNNLECRAGFI | |
| | | | | PAGEDAVLWTEWESISGIKVKNSPLWQTNPKQQFGYLQARNW | |
| | | | | ARLYAPDALLGVYTEDELQVMPSQPSVRDMGQAEEVARPALP | |
| | | | | AYPQADFDKNLPGWRNVVESGRKSAPDLLAMLQTKATFSAEQ | |
| | | | | QEAILALGVIEQDAAEVDDPFVRDMEAAEGEQQ | |
| PF037 | SSAP | recT | Haemophilus parasuis serovar 5 | MTTNLPSNIQTALSERGIDHAVWSTLQNSIFPGAKDESILLAIDY | 173 |
| | | | (strain SH0165) | CKARKMDILKKPCHIVPMNVTNAKTAEKEWRDVIMPGIVEQRI | |
| | | | | TAFRTGQMAGQDDPVFGDTIEYLGVNAPEWCKVTVYRFVNGE | |
| | | | | RCAFSHTEYFTEACAITEIWKDKQRTGKYKVNSMWTKRPRGQ | |
| | | | | LAKCAEAGALRKAFPDELGGVITADEITEEPINPASPQQTVIDV | |
| | | | | DGVVRIADEQRQQLDQLIQITQTDVAKAIAVYGVNSLDQLPKD | |
| | | | | KAEHLIKILNERVDKLQAQSENLGENIPL | |
| PF038 | SSAP | recT | Sodalis glossinidius (strain | MANELNTTSAILAEKGVDFATWSALKNSIYPGAKDESVMMAL | 174 |
| | | | morsitans) | DYCRARQLDPLMKPVHLVPMYITDAKTGKGQQRDIVMPGVEL | |
| | | | | YRIQADRSGNYAGAKEPEFGPDETKIFGADETKNFKGIEVTFPQ | |
| | | | | WCKYTVCKMMPSGQIVEYSAKEYWLENYATAGRDSSAPNAM | |
| | | | | WKKRPYGQIAKCAEAQALRKAWPEIGQQPTAEEMEGKTEDVI | |
| | | | | DARDVTPSASHSTSHKSATTETLQAINDLLLSLDKTWDEDFLPL | |
| | | | | CSTVFKRQVSKAAELTDQEALKALDFLRKRATKDAA | |
| PF039 | SSAP | recT | Nocardia farcinica (strain IFM | MARNLVDRIEQNAPAKNDDLKAAIQKMEKAFALAMPKGAEA | 175 |
| | | | 10152) | TQLIRDAFTAIQRTPKLAQCEQLSVLGAFMTCAQLGLRPGVLG | |
| | | | | QAYVLPFWDRKDRMYKAQFVAGYRGLVDLAYRSDRVLSVSA | |
| | | | | RIVHANDYFELEYNAVEDRLVHRPYLDGARGEARLYVAAGRT | |
| | | | | RGGGSAITDPVTVADMLKYRDRYATAKNKEGKVFGPWVDEF | |
| | | | | DGMAKKTMIRQLSKMLPMSTELTLAVENDGSVRFDLGKDAIE | |
| | | | | SPQRLEPDVIDAEAVATSDVQDAPADYVEDVPPAAEGGMFAPE | |
| | | | | GE | |
| PF040 | SSAP | recT | Parasutterella excrementihominis | MENIEIKAQTVSLVARLAAKFGVEPGKLMACLMNQVFKQSDG | 176 |
| | | | CAG:233 | VAPSNEELMVLLLVCENFGLNPFNREIFAFRGKGGDVIPVVSLD | |
| | | | | GWCKIVRNQKDFNGMSFKFSESTIKLNCYGGELPEYVECSIKLK | |
| | | | | GVEDPVTIQEYMVECFNEKSSVWRKWPRRMLRTRGFIQCARL | |
| | | | | AFSLTGIYDEGDTFGEDSENGSGTTSDLKSQIPLVQQIPARPSLE | |
| | | | | KSRLDALIGKLIEHAKNRDDGWKRAFQWIEEKFSQEDCAYARE | |
| | | | | VLTAKRKELSLSSLPEGNEILPEETSPATLQGVSNEDR | |
| PF041 | SSAP | recT | Salinispora tropica (strain ATCC | MTQTVSQAVATRDNSPAGLITQYSESFAQVLPSHIKPATWVRL | 177 |
| | | | BAA-916/DSM 44818/CNB- | AQGALKRGKRGDGGRFELEIAASNNPGVFLAALEDAARQGLE | |
| | | | 440) | PGTEQYYLTPRKVKGRLEIEGITGYQGHIELMYRAGAVASVVA | |
| | | | | EIVREHDEYRYQRGIDDVPVHRYKPFARDAERGALIGVYAYAR | |
| | | | | MKDGAVSRVVELSRDDIDRIKASSQGANSEYSPWQKHEAAMW | |
| | | | | LKSAVRQLQKWVPTSAEFRREQLRAAAEAHRVASAADAPDGA | |
| | | | | TAPQGDVLDGEVLDEAPTEPARSDDAGGHVEQEWPDAARPGG | |
| | | | | AQ | |
| PF042 | SSAP | recT | Microbacterium ginsengisoli | MSEVALPSSVRPDTWNADTAAMMEFAGLTWIEGVGDAAHRV | 178 |
| | | | | FAPSGVMAAFIAACARTGLDPTAKQIYAAQMGGKWTVLVGID | |
| | | | | GMRVVAQRTGQYDGQDPIEWLAAEDGQWTTVPPKAPYAARV | |
| | | | | AIYRKGVSRPLVQTVTLAEFGGRGGNWSQRPSHMLGIRAESHA | |
| | | | | FRRAFPMELAGLYTPEDFESDDVDTSDAPWEEREDWGALIASA | |
| | | | | TTTGDLARVGARIAESGQGNDDIRAAYRARAAVLATEANTVD | |
| | | | | ADVVDDQTPAEGEDASPTPPASPSAGTPDDYEAAASAEFDAAV | |
| | | | | ERGEI | |
| PF043 | SSAP | recT | Labilithrix luteola | MASTEMTRSAGAAPLARRGGGDLKEFLGSDAVRKKLAEAAG | 179 |
| | | | | KVMRPEDLIRFALVAASRTPDLAKCSKESVLRSLLDSAALNIMP | |
| | | | | GGLMGRGYLVPRKNTKNNTTECHFDPGWRGLIDIARRGGKVR | |
| | | | | RIEAHVVHAADVFSVERSPLTTLHHVPSELDDPGEIRAAYAVAE | |
| | | | | FVDGGIQIEVVTRRDLNKIRAMGAKNGPWSTWGEEMARKTAV | |
| | | | | RRLCKYLPYDPLLERAMHASDESDVNAFDEVVEVTAPKKRRR | |
| | | | | SLDEKVDEVAASMLPPAEPDSQQDLPVDADFDEADDGTSDAA | |
| | | | | EPTN | |
| PF044 | SSAP | recT | Agathobacter rectalis (strain | MAEQNAVATQQGTQLSVAAQVKSMISQDAVKKKFTEVLGQK | 180 |
| | | | ATCC 33656/DSM 3377/JCM | APQFLASITNVVAGSAQLKKCPATTIMSAAFVAATYDLPIDSNL | |
| | | | 17463/KCTC5835/VPI 0990) | GFAAIVPYNNNKYNPQTRQWEKHPEAQFQMMYKGFIQLAIRS | |
| | | | (Eubacterium rectale) | GYYEKMNCSVVYKDELVSYNPITGEVEFVTDFSKCTQRAEGKS | |
| | | | | ENIAGYYAWFKLLTGFRKELFMTTAEVENHARKYSTAYRYDL | |
| | | | | ENNKKGSKWTTDFEAMALKTVIKMLLSKWGILSVDMQRAIQD | |
| | | | | DQKVYDEDGEGSYGDNQPDIVEAQDPFGNIEQKEEEQQIGGLD | |
| | | | | LEEVE | |
| PF045 | SSAP | recT | Spiroplasma kunkelii CR2-3x | MITELQQVIKGAIIKYELKVNDKYLKENILALEELKMKNGQSYM | 181 |
| | | | | QLVNTADNTKITALGIIKLSNKGLIFGKDFNIIPFKNKLTTVIDS | |
| | | | | KVYCKRIEESGYSPRKAIIFKGEKFEWDSENSCPKIHEINFNANT | |
| | | | | SDYNEIIGAYAFAKDKNGNYQGILLRKADIERLKNSSPSGNSEY | |
| | | | | SPWNKWPKEMVEAKLYRKLALEMGIDISDIDLDEKEIKEDGNF | |
| | | | | EYISFKDINVAKNKGQISDEPLSSAFLIKILDIVFSLILAFSIVC | |
| | | | | KISLYLFPSPKNEVILFIKFCSFLWYFFKPNSSSKG | |
| PF046 | SSAP | recT | Methylobacterium nodulans | MTAGALTLSDAERRVAERVDPAATAALSVSAESGGVAFANAG | 182 |
| | | | (strain LMG 21967/CNCM I- | QLMEFAKLMAVSSAGVRKHLRGNPGACLAICTQAVEWGMSP | |
| | | | 2342/ORS 2060) | YAVANNSYFVNDQIAFESKLVQAVILKRAPIKGRIRFEYTGDGD | |
| | | | | ERRCRAWARLADEPDEVVDYLSPPLGKITPKNSPLWKQDPDQ | |
| | | | | QLAYFSGRALCRRHFPDVLLGVYADDEIEVAPRGPDQARDVTP | |
| | | | | RGLAGRLDALAAAPPPTASAAVDAFTDTEAPGNGPATAPAEDE | |
| | | | | PETGAQGADVGESGDWHDPALGGAADDFPGNDALSDMRTGR | |
| | | | | RSSRWEA | |
| PF047 | SSAP | recT | Anaerococcus hydrogenalis ACS- | MTNAKNALKKNAQNKAPAKKQNTTVRGLLMAMKGEIQNALP | 183 |
| | | | 025-V-Sch4 | SYLPTDKFIRTALTAINTTPKLAECTQDSLLAAIMNSAQLGLEEN | |
| | | | | TPLGESYLIPYENKKLGITTVNFQIGYQGLLKLAYNTGQFKRIT | |
| | | | | AREVRENEDFVINYGTGEVKHEPCLTGDSGDVIGYYAIYQTKD | |
| | | | | GGQDVFYMSKADAEKYGRTYSKSYNFSSSPWQSNFDAMAKK | |
| | | | | SCLIQVLKYAPKAIESQKLVEATKTDNANFKSYKKEDDGSINLD | |
| | | | | VDYEVEVEEDKKEAPKNVDKETGEIKSEDIAQTGFFEDDFEPVS | |
| | | | | E | |
| PF048 | SSAP | recT | Sporosarcina newyorkensis 2681 | MTNQLQPQSNTPAEKKNELVTKVADKVQRMVENNQINIPQNY | 184 |
| | | | | SIVNAVQAAYFKLTEVDFKKKTSLMDTATPDSVAFSLQDMAIQ | |
| | | | | ALSVAKNQGYFIVYGDKMQFVRSYHGTQAVLKRLNGVKDVW | |
| | | | | ANVIWKGETFDVEYNDRGQLAFKSHTVDWQAATGKKEDIQG | |
| | | | | AYCIIEREDGVQFLTVMTMAEIKTSWSQSSTTAVQDKYPQEMA | |
| | | | | KRTVINRASKAFINTSDDSDLFIGAVNRTTENEFEDDRPIKEINP | |
| | | | | QHEIDQNANKEVLDFTEPEQSPQPVQEPELVQEPVRQPEPASSG | |
| | | | | GPGF | |
| PF050 | SSAP | recT | Clostridium beijerinckii (strain | MAETGLVLSKEDAFNNVMAKIAALEKNNGIKLPKNYSAENAIN | 185 |
| | | | ATCC 51743/NCIMB 8052) | SAWLMLQEVVDKEKKQALEVCTKTSIVEALYNMVLQGLSPSK | |
| | | | (Clostridium acetobutylicum) | RQCYFIVHGSKLTLMKSYMGSIVATKRLSGIKDVKAFVIYEGD | |
| | | | | VFETVFNNETYTIEFNYQPKEENINSNKIKGAFALIIGDDNKLLH | |
| | | | | TEIMTIDQIRKSWGMGIAYKSGKSNTHNDFGEEMAKKSVINRA | |
| | | | | CKRFYNTSDDSDVLIESLNNTDEDYDEADIIENAKEQVHEEIKA | |
| | | | | NANQEVIDVDPKQVTEIDNNNNENPIQKDLNNKKTEKAEQQM | |
| | | | | MCEF | |
| PF051 | SSAP | recT | Paenibacillus alvei DSM 29 | MSTAVQNINTQAVVGSFTQSELDTLKSTIAKGTSNEQFALFVQT | 186 |
| | | | | CARSGLNPFLNQIYCIVYNGKNGPVMSIQIAVEGIVALAKKHPQ | |
| | | | | YKGFIAAEIRQNDHFKAKIHTGEVEHEPDVMNPGETIGAYCVA | |
| | | | | YRENAPNVLVIVRRDQVEHLLKGRNSDMWRDYFDDMIVKHAI | |
| | | | | KRAFKRQFGIEVSEDEYVQPNSIDNTASYETRKDITADVESGTP | |
| | | | | QLQQPLQNSQNGENGEIKKVRRDISAAFKKLGITTEKAMTEYT | |
| | | | | MARMKQKGDKPTLQELTGLLKVMQLEIEEKEVFADGASEAGL | |
| | | | | EPLE | |
| PF052 | SSAP | recT | Bacillus sporothermodurans | MANNQLAVYQDLTFGELTQQDIVTVRETIGKDCNESQFKLFMS | 187 |
| | | | | IAKNSGANPILNEIYPAVRGGQLTVQFGIDFYVRKAKETEGYQG | |
| | | | | YDVQLVHENDGFKMHQEKDEDGRYVIVIDEHSWGFPRGKVIG | |
| | | | | GYAIAYKEGLKPFTVIMEVDEVEHFKKSNIGMQKTMWTNYFN | |
| | | | | DMFKKHMTRRALKAAFNLNFDDDEVGEGSGSDGIPEYKPQTR | |
| | | | | KDITPNQEIIDAPSKQEVHEEDPQLAQAKKDMKTKFKKLGITTK | |
| | | | | KGMQDYIKQHAPQIGDNPTYQQLVGLLDIMDMHIDMNEVQAS | |
| | | | | DADDVLE | |
| PF053 | SSAP | recT | Bacillus sp 2_A_57_CT2 | MAKNNELATQSAELNELHQIGGFGVNELMTMKETVGKDLSIP | 188 |
| | | | | QFNLFMYQCNRMGLDPSLRHAFPIVYGGKMDIRVSYEGLKSLA | |
| | | | | QKSDGYQGVFTQVVCENEIDDFDVLLNDEGEMVGVKHKPRFP | |
| | | | | RGKVLGAYAVAKREGRSNYVVFMDVSEVQKWMKINGKFWK | |
| | | | | QDNGDVDPDMFKKHVGTRAIKGQFDIADVVVDGMEAVADSN | |
| | | | | PIPEYKPGERKDITPDNNVIEPPKESEEEKHKKAERSSINQAFKK | |
| | | | | LGITGKKETAEYIEKHAPSFTNENPSEADLNGLLKLLEMNLEMI | |
| | | | | EMQSGGDELE | |
| PF054 | SSAP | recT | Thermaerobacter marianensis | MAVQTDQVRNKLARRAQENGAPAPSQQPKTIEQWLRDERFRA | 189 |
| | | | (strain ATCC 700841/DSM | EIERALPRHLSADRKKRITLTVLRTTPELRRCTVPSLLAAVLQCA | |
| | | | 12885/JCM10246/7p75a) | QLGLEPGVLGHVYLVPFKNGKTGEYEVQVIIGYKGWVELARR | |
| | | | | SGQIQSLTARVVYQNDEFELSFGIEDNERHVPWYMRPNVQDGG | |
| | | | | PIRGAYSVARFKDGGYHLHYMPIQQIEARRKRSRAADSGPWKT | |
| | | | | DYEAMVLKTVVRDASKWWPLSPEIARGLAQDESIKRTVDDVD | |
| | | | | SDAPYFGEDVIDVQGEDVGEGGEDAAHEEGGDASAGGDGSAQ | |
| | | | | FGLFGGGGQ | |
| PF055 | SSAP | recT | Salinicoccus halodurans | MTKNEVLVKNQKMGDNVLARVKELEGQGNLNFPANYAPENA | 190 |
| | | | | MKSAMLILQDLKGSKKDGYKPALEFANPNSVANALMDMVVQ | |
| | | | | GLNPQKSQGYFIMYGDKVQFQRSYLGTMSVTKRVTGAKEINA | |
| | | | | EVIFEGDDVEYETINGKITNLKHKTKFGNRDTKNIIGAVATIVFE | |
| | | | | DESKNYTEIMTTDEIETAWKQSQMVYNGEFKADGTHRKYPQE | |
| | | | | MSKKTVINRACKKLLNSSDDSSLLKQQVMNSDDRQRKEVFDT | |
| | | | | QVSENHATEDLDFPDDVVDGEFKEADQEPEPMQKPVDYDEET | |
| | | | | GEVKEDDKDDNPF | |
| PF056 | SSAP | recT | Dialister sp CAG:486 | MDARKGIVATRNEMTAQQQERPSIPKLLNNTLDNSGYKRRFDE | 191 |
| | | | | LLGKRAPQFVSSLAALINSTPQVLSIFQNNPVAIIQSALKAAAVD | |
| | | | | LPIEPSEGYAYILPFGQTATFVLGYKGMVQLAERTGLYMRLNA | |
| | | | | VDVREGELISYDRLTEDIEFRWEADNAKRAKIPVIGYAAFYRLK | |
| | | | | NGMEKTLFMTKAEIDAHELANRKGRSQNPVWRNHYDEMAKK | |
| | | | | TVLRRLLSKWGIMSINYLDASPADQEVMRNMAEGTLDDTEMP | |
| | | | | QERTIANSPNLAPVSPADPAEAITIPWEQGNAQEGQNQAVAGE | |
| | | | | AMNGGEGK | |
| PF057 | SSAP | recT | Leuconostoc mesenteroides subsp | MANEVAQVQKIINSDKMQKHFEEILQDNAAGFLSGLSTVVALN | 192 |
| | | | mesenteroides (strain ATCC | PDLAKTNMNDLTNAAMRAAILDLSVLPDLGEAYVIPYGKRAK | |
| | | | 8293/NCDO 523) | VDGKWVTKDVKAQFQLGYRGIIKLVQNTGRVGRLGGSVVYE | |
| | | | | ANKPHYNYVFDEFTMENENYDPYVDGESPVAGYLAFYYLDGE | |
| | | | | RIVKYWPIQRVINHATKFSQTYKGPDHKDRYGKTPQTPWYTDF | |
| | | | | DAMAIKTVMKDLLKFAPKTTKVAQAIAEDDKNEREARDVTPE | |
| | | | | TEEITPEEQNVEPEIIDNQPAEKSDNPFSGVDTGDAPNPFAEKNE | |
| | | | | TSEDVKWVSQKQ | |
| PF058 | SSAP | recT | gamma proteobacterium BDW918 | MSDQNPLVICKDQIAKSAVKFGSSELSYESEEIFAMQQLMKND | 193 |
| | | | | YLLKTAVNDPDSLRLAMYNVASTGISLNPARHEAYLVPRADK | |
| | | | | KGQPAKIKLDISYRGLIALAQSEGIIANAVCELVYEQDTYLFKG | |
| | | | | PTRIPEHAANVFSTTRGAVIGGYCITELTNGKVQIHNMSKADM | |
| | | | | DQIRDSSQAFGSGSGPWVEWESQMQLKSIVKRAAKWWPASTP | |
| | | | | KMAKVIEFLNVENGEGIATIEHQPSNRIVAPAKPEDIDSRTLGFI | |
| | | | | NQALTRAVQSQSFEACGELIRERVKDPAALAYGLEKLKELQTQ | |
| | | | | HGDYRHAG | |
| PF059 | SSAP | recT | Paenibacillus sp P1XP2 | MANNTQIILTPEIKEAFPAEVLDVIRTSLCPTATDPEFLLFAHKA | 194 |
| | | | | ASYRLDPFKNEIFFIKYGSQARIQFAAEAYLAKAREKEGFQPPD | |
| | | | | TQTVCANDTFKARKFKNDKGEDEWEVIEHEVTFPRGPIVGAYS | |
| | | | | IAYRDGYRPVTVFVDKEHIAHMYTGQNKDNWNKWEPDMIGK | |
| | | | | HAEQRALKKQYGLDFGNEELEHPPAPAASSFERKDITNEVNQA | |
| | | | | TAAANAQSTPSSDQPNGSQAEEDEEAKINALKAQMKQNFAKL | |
| | | | | GLVNKADRDAHMAKHFKIKGEQPTIAEIMAYLKIMDLQIQEKQ | |
| | | | | ASLNDELPL | |
| PF061 | SSAP | recT | Gramella forsetii (strain KT0803) | MSSETSKQLVKQKKQDISTRVLAKVNEFEQTGELRIPKNYSVE | 195 |
| | | | | NSLKSAYLIELSETKDKNKKPVLESCSVTSLSEALLKMVVWGLN | |
| | | | | PMKKQCYFVPYGGKIECIPDYTGKIAMAKRYAGLKDIKAHAVF | |
| | | | | KDDTFEFEVDPSTGRKKVTKHTQTLESMGSNEFKGAYAIMEM | |
| | | | | NDGTFDVEIMSKPQIVAAWQQGHANGTSPAHKKFPDRMARKS | |
| | | | | VINRACDALIRSSDDSVLYEDEDERKIIDVPSEDLKHEVKTKAN | |
| | | | | KRNFDTSDIEDADYEEDEEPTNEAENEDDENERLYEEAMAEEE | |
| | | | | GQSSMANSPGFGA | |
| PF062 | SSAP | recT | Brevibacillus brevis (strain 47/ | MSEAKTVNQSALAGQLAQRTMTKAENFNAVIKKELADNFQAI | 196 |
| | | | JCM 6285/NBRC 100599) | KSLVPKHMTPERLARITLTAISRTPALIDCTPASIVGAVMNCATL | |
| | | | | GLEPNLIGHAYLVPFKNNRTKQMECQFQIGYKGQIDLIRRTGD | |
| | | | | VSKIYAETVYENDLFIYIKGEDKRLVHVPFDMLHHLENFTPSKD | |
| | | | | DFMDIMMAQAIGAIKSRGANDQGKPVRYYSAYRLKDGAFDFV | |
| | | | | TMTAEQCQKHAMTHSAAKKDGKLVGPWKDHFESMCKKTCIK | |
| | | | | EMAKYMPISIEVQEKLSTDEAVLKLRKDNGIESDNIFDVDYKIV | |
| | | | | EEGQAEPDEEAAE | |
| PF063 | SSAP | recT | Prevotella sp CAG:873 | MSKVNFSAQYIASLKPMQIVKDNLVRQRFIDLYGALWGEANA | 197 |
| | | | | EATYEREVIHFNRLLADNANLKACTPVSIFIAFIDLAVCGLSVEP | |
| | | | | GVRALAYLQPRGYKTGQKDATDKDIYEQRCTLTISGYGELIQR | |
| | | | | TRAGQIRHADNPVIVYEGDGFSFTDHNGTKSVEYTLNINHNPER | |
| | | | | PVACFMRITRADGSIDYAVMLEEDWRRLAGYSGKANKKWDY | |
| | | | | DTRSYVEVPNSLYSSGEGNRIDSGFLMAKCIKHAFKTYPKLRIG | |
| | | | | KGTTYEADEAPRQEDDFYGMGDNEQPTAQPEESFAPAPDTSAG | |
| | | | | VTVDPSQSDDNDETF | |
| PF064 | SSAP | recT | Bacillus sp 1NLA3E | MSTQNELAVKTSSERFLNNIQAQFAAEAGSPVAFSDYEKALAQ | 198 |
| | | | | HLFLKLDSVLQDFEAKRINSGKTQQAPYNWHNINMRKLSLDA | |
| | | | | VHTVQLGLDALIANHIHPVPYFNGKEKKYDLDLRVGYIGKAYY | |
| | | | | RMEAAVEKPKDVVIELVYSTDHFKPMKKSFSNSIESYEFEIQKP | |
| | | | | FDRGEIVGGFGYLVYDDPAKNKLILVSEADFDKSRKAAKGDTF | |
| | | | | WSKHPAEMRFKTLVHRVTEKLQIDPKKVNASYLYVENKESED | |
| | | | | EVRKEISENANKDVIDVEFSETPDEPVNKEPKVENHSEHFEEAP | |
| | | | | PQQEQMEFAPTGTGGPGF | |
| PF065 | SSAP | recT | Faecalibacterium sp CAG:82 | MAKAMQPQKLYFSQAMQTEKYKKLINNTLGDPVRAARFAANI | 199 |
| | | | | TSAVAVNPTLQECDAGTILAGALLGESELLQPSPQLGQFYLVPF | |
| | | | | KSKAKRDRQGNVIEPACLKAQFVLGYKGYTQLALRTGQYKRL | |
| | | | | NVLEVKSGELGGWDPFEEREHEMHFIEDFEKRAAMPTVGYIAH | |
| | | | | FEYINGFEKTLYWTADRMMAHADKVSPAFSATAYKKLLNGEI | |
| | | | | PQEDMWKYSSFWYRDFDGMAKKTMLRQLISKWGIMTVEMTT | |
| | | | | AYERDGRVMVPNSADDGLLPETPDFADAGQNGLSEQDPPKIER | |
| | | | | TAKTMDLPEPEADEVKAAVDLATL | |
| PF066 | SSAP | recT | Pelobacter propionicus (strain | MSNALVKLEFDKEQMAVIETQLEPSGTSKAEQQVCLSVARELC | 200 |
| | | | DSM 2379/NBRC 103807/ | LNPITKEIFFVKRRQKIDDKWVTKVEPMVGRDGFLSIAHRSKQF | |
| | | | OttBd1) | AGIETTAGIREVPQLEGGQWGFKNQLVTECIVWRKDSPKPFTV | |
| | | | | QVAYNEYCQRNSEGNPTKFWAEKPETMLKKVAESQALRKAFN | |
| | | | | IHGVYCPEELGAGFELASGDIVIQAIEEERPGNETDKSHLSVVKP | |
| | | | | PQAETQATKTPKHQKSSTATTSQSAPINEEVQTSPPSPGQVIDEA | |
| | | | | ALEVIELLDGKHIPYDIAINGEDGIISAKSFNEKELEKSSGFRWS | |
| | | | | ADQKRWIYKFRNEPF | |
| PF067 | SSAP | recT | Herbaspirillum sp YR522 | MNQVALSPAGTLNQFLKQHKNQIEMALPKHITPDRMMRLTLT | 201 |
| | | | | AFSQNRSLQDCTPQSIFASVIVASQLGLEIGVGGQGYLVPYKGT | |
| | | | | CTFVPGWQGLVDLVSRAGRATVWTGAVYRGDKFDWALGDRP | |
| | | | | FVKHQPEGDGDDWHDITHVYAIGRVNGSDHPVIEVWTMDRIV | |
| | | | | RHLNKFNKVGGKHYALTNNGQNMEMYARKVALLQVLKYMP | |
| | | | | KSVEVMRAMDVANAVDSGKNFTFDGDVVVIDDRDIDESPGDS | |
| | | | | SPGATGVQQQSGGRPEIPECTDEEFKAKTPRWRKQLLEDGVSE | |
| | | | | ADLVKMIETRTKLTEDQKTTINSWTHEND | |
| PF068 | SSAP | recT | Desulfovibrio sp FW1012B | MSNGNLPQESGGASVAALIQQQIPAIAMAVSGGTKEERQKRAE | 202 |
| | | | | RFARVALTTIRNNDKLAQCRVESLLGALMTSASLNLEIDPRGLA | |
| | | | | YLIPYGREAQLQIGYKGIKELAYRAGGIKAIYAEVVYKPEVEAG | |
| | | | | MFTIEIGLSRSLTHKLDPERPELRNGDLVLAYAVAEMEDGRRH | |
| | | | | FAYCLRDEVEKRRKTSKMNTASPDSTWGKWAEEMWRKTAVK | |
| | | | | KLCKDLPQSTEDAMAKAVALDDQAEAGVPQTFDLPKDFIDVT | |
| | | | | PEPKTASDRAAQVLGKTEAEAAPPVDAPTSVPCPNRPNDETGG | |
| | | | | FWDVKATVCEGCMDRGGCPSWVAA | |
| PF069 | SSAP | recT | Nitrolancea hollandica Lb | MADNNHALAIVPDSNEVKSLAKRLVPQFPSDCNAEQAADVAR | 203 |
| | | | | VAVAYGLDPFLGELIPYKGKPYLTFDGRIRIADNHPAYDGYDH | |
| | | | | GPVLGDERTAFMPQNGEVIWKCTVYRRDRSRPTVAYGRAGGD | |
| | | | | KETNPIAKKDPVTMAQKRAIHRALRAAFPVPIPGGDDDPVTPA | |
| | | | | QLKAIHATDSEQGITVTERHEVLEATFGVGSSKDLTAAQAGAY | |
| | | | | LDERAAQKPAMEQPAIEVTARPATPPQEPTDPPVGALLSARQQ | |
| | | | | RRIYELRDELGKQTAELNAAIQELYKVDSIEGLSEAQASRFIRSL | |
| | | | | QRSAEKARQQQADDVIDAELADIPF | |
| PF070 | SSAP | recT | Fusobacterium mortiferum ATCC | MAETKRATNSLVKGSNGAVTEKKPNKTIYEIIKAGEKQFAAAL | 204 |
| | | | 9817 | PKHLNSERFTRIAITTIRQNPKLAECNAESLLGSLMTIAQLGLEP | |
| | | | | GVLGQCYLIPFKNNKLGTIECQFQLGYKGMIELLRRTGQLSDIY | |
| | | | | AYTVYSNDEFDIEYGLDRTLKHKPAFTNPEGRGEIVGFYSVAIL | |
| | | | | KDGTRAFEYMTKKEVIEHEEKYRKGNFKNEIWNKNFEEMSLK | |
| | | | | TVTKKMLKWLPISVEMIENLRKDEQIHKLDEKTNEVTSEYIDEN | |
| | | | | IINYDEDGVIVEEKPTTEDMQTEMTISQASGIDITKKAKELYGVS | |
| | | | | TLDDINMEQYNELKEIAING | |
| PF071 | SSAP | recT | Akkermansia sp KLE1798 | MALTPGLVTLNHAKIMSNESTDKLDLPQAPVPKKTLYEIVMSE | 205 |
| | | | | DVKTHITQFVEGMMTPERCISIFWNCCQKTPLLQQCAPITLISSL | |
| | | | | KNLLLMRCEPDGIHGYLVPFWVNDKRTGNSILTCAPVPSARGL | |
| | | | | MRMARSNGVTNLNIGIVREGEPFSWREDDGKFTMGHIPGWGD | |
| | | | | NEDPIRGFYCTWTDKDSYLHGERMSLKAVEEIKGRSKSKNKKG | |
| | | | | EIVGPWVTDFGQMGLKTVIKRASKQWDLPLVIQAAMQAADDQ | |
| | | | | EFEGNMRNVTPEKTDGPAEGETPWNNAPAPEAFQNDQPEALPE | |
| | | | | PKPEGQDDLIPGLKMPAPKETATVNMEDY | |
| PF072 | SSAP | recT | Thiorhodovibrio sp 970 | MTRSMQAVPKADAPRIPMPAVDPALNLTPSTWKVLTDSIEFPAA | 206 |
| | | | | KTAEGILLAVHYCAARNLDVIKRPVHVVPMWSKALGQEIETV | |
| | | | | WPGIAEVQTTAARTGQWAGIDPPRFGPVIERTFSGKVKRNGAW | |
| | | | | QDLDYAVSFPEWCEVTVYRLVGGQRCPFTEPVFWLEAYARQG | |
| | | | | GAYSELPTEMWVKRPRGQLMKCAKAASLRAAFPEEASYTAEE | |
| | | | | MEGKVIEADTSIPVAASLDATGTVPAKADTAPSGVAEAASDAA | |
| | | | | PSKASETPTDSEPRAEPITLDPSLQARIDKVVARAAEKSAWKQA | |
| | | | | EQYLRARCKGAELKQALEALDQAQQTAEQRLAA | |
| PF073 | SSAP | recT | Pedobacter antarcticus, | MSNQIQVTKDYIDRLHPLSVVKDAAIGDHFINKFVAMYRVPRE | 207 |
| | | | Pedobacter antarcticus 4BY | QAVAFHEREKDNFIKRITDSEDLSACTPMSIFLAYMQVGGWQL | |
| | | | | SFEGGPQSDVYLIPGNRNVAPKGQPDKWIKEVVAQPTPYGEKK | |
| | | | | IRIQNGQIKDAAKPIIVYECDDYEEFTDDIGNVRVTWKKGNRGD | |
| | | | | KPVIVGSFIRIEKPDGSFEIKTFDMGDVAKWKASSENKNSKWD | |
| | | | | AAAGRKLPGKANALYTSNSGQIDKLFFEGKTLKHAFKLYPKVV | |
| | | | | NSPKLPDAFVPVASDAIRQGFDVSEFTEAEYVPEEDLSQSEQSD | |
| | | | | FDVALEEAHNTEPIQTKTFAGIDTSDEPEF | |
| PF074 | SSAP | recT | Rhizobium loti (strain | MMNAITTYTHSPRQLALIQKTVAKDCNTDEFNLFVEVARAKGL | 208 |
| | | | MAFF303099) (Mesorhizobium | DPFLGQIIPMIFSKGDSNKRKMTIIISRDGQRVIAQRCGDYRPAS | |
| | | | loti) | KPPSYEFDAELKSETNPQGIVSATVYLWKQDAKTAAWFEVAG | |
| | | | | QSYWDEFAPISYPYDAYKMVDTGETWEDSGKPKKKRVLRDG | |
| | | | | ATPQLDDSGNWCRMPRLMIAKCAEMQALRAGWPEQFTGLYD | |
| | | | | EAEMDRAKVLEMAASEIVAHEQEENRLRLVAGNDAITMSWGD | |
| | | | | GWALENVPAGEFMDRCLAFIRESDHQTVVKWNSANRAGLQLF | |
| | | | | WAKHPGDALELKKAIEKASRAPVEIDHIADAARREIAQHPVSA | |
| | | | | G | |
| PF075 | SSAP | recT | Stigmatella aurantiaca (strain | MDGHNKAETTAAQQAWGRERVELIKRTICPKGIGDDEFSLFIE | 209 |
| | | | DW4/3-1) | QCKRSGLDPLLKEAFCVGRRQNAGSRERPTWVTRYEFQPSEAG | |
| | | | | MLARAERFPDFKGIQASAVYAEDEIIVDQGKGEVVHRFNPAKR | |
| | | | | KGALVGAWARVVREGKEPVVVWLDFSGYVQQTPLWAKIPTT | |
| | | | | MIEKCARVAALRKAYPEAFGGLYVREEMPAEEYEPSSAAEEPA | |
| | | | | PTTGTGTYEVLGARPGPVKASFPPLPAAQLSMEVQPPVAAPVA | |
| | | | | EPPPAAETAPRPRSSATVVAFGPYKGKTASELSDDELSETIDLA | |
| | | | | HEKLMEQPKAKWAKAMRENLVALDAETELRCRVPASGKKEA | |
| | | | | SAEA | |
| PF076 | SSAP | recT | Methyloversatilis universalis | MTGPELAAAAKQTAQQAGSATVKKFFEANRGTLEALLPRHFD | 210 |
| | | | (strain ATCC BAA-1314/JCM | SERMLKLALGALRTTPKLANASLSSLLGSVVTCAQLGLEPNTPL | |
| | | | 13912/FAM5) | GHAYLLPFDKREKQNGQWVTVETQVQVIIGYKGMLDLARRSG | |
| | | | | QIVSIAAHEVCQNDEFVFAYGLNEELVHRPAMKDRGPVIGFYA | |
| | | | | VAKLTGGGYSFEFMSVDEVNHIRDKAAEKNRAKRDAAGNPIIT | |
| | | | | GPWADNYVEMGRKTVLRRLFKYLPISIESLAFASAVDGQAIREP | |
| | | | | APLEQVAFESSEPAEEPTSYDQQDEDLRALEQSQPARVPPVQVE | |
| | | | | QPAEAWQPSAEEAAELERQQAAEAAADQQRASAPRGRGQRS | |
| | | | | MSLE | |
| PF077 | SSAP | recT | Hydrogenovibrio marinus | MYSQQAYPEQNQYPAATNNVVSVFDNSENKSAIKKLLPRHISI | 211 |
| | | | | DKEMQIANTAAMQFPDLQECTPESLFVAFSRCAQDGLIPDGRE | |
| | | | | AAIVSYNKKQGNTWIKVAQYQPMVEGVLKRLRMSSQVKNVIA | |
| | | | | KVVYENENFNHWIDIDGEHLMHQPVFDDKRGELKLVYALAKL | |
| | | | | DSGEKVVEVMLKSEVEEIMMNSKSAVDKNGVLKPYSVWATH | |
| | | | | FPRMALKTVIHRITRRLPNASEVAEMLEREIDYKEVSEDRQPQT | |
| | | | | IEHNQNQGSQDREIIPLEQQMELKKLVEQTGSDENNMFNWISN | |
| | | | | KTEILVSSYDQLDFNQFTRLKTRLENAIAKQVAAQRQQAMEQS | |
| | | | | GEFVSA | |
| PF078 | SSAP | recT | Photobacterium profundum (strain | MNELQRTNNQAPVNHQVNAVPTSSISILDTNKLDVMIRAAEFM | 212 |
| | | | SS9) | SKAVVTVPEHLRGNSSDCLAIVMQAEQWGMNPFTVAQKTHLV | |
| | | | | SGTLGYEAQLVNAVISSSRAIVGRFHYRFSGGWERLVGKVGYE | |
| | | | | KQQRTNFKTKAKWEVTVATKKWLPEDEAGLWVECGAVVAG | |
| | | | | ESEITWGPKLYLASILVRNSELWVTKPQQQIAYASLKDWSRLY | |
| | | | | TPAVMQGVYDREELAQPSFENIRDITPEIKPIKQLNNEPSIDSLM | |
| | | | | GGDAVEAETAGSNEPNLNALVSGDIEMMQNDDTPSVFETTRD | |
| | | | | LITDISDIQECVNYRRDIETMKNNQTITANEFSILKKMIKTVHNT | |
| | | | | FNVQG | |
| PF079 | SSAP | recT | Pirellula sp SH-Sr6A | MTAAAEERTEHVSGASPKRSEAMILLEDLQSDDTSRKLLQILPS | 213 |
| | | | | HMKPEFFVRVVINQLNKNPKLALCTRQSFIGSVLDLAAIGLEPD | |
| | | | | GRRAHLIPYGRTCTYQLDYKGIAELVLRSGKVSHVAADVIRRG | |
| | | | | DIFVWNKGQLKEHVPHFLRTDAKAPKEAGEVFAAYSLVVFKD | |
| | | | | GTERAEVMSRADILAIRDGSPGWQAFVAKKSNDTPWDPRFPH | |
| | | | | KEFEMWKKTTFKRLSKWLPISAEAQAAIEKEDRNDYGDRNSN | |
| | | | | VINSPSVRTVRSADDLKEELKRRNAESTSTEVIHDTEFVAPEGIS | |
| | | | | KQAELLELKAATDPLTIIEIERDLEHVRAEDRDEVLAAIASAKA | |
| | | | | RL | |
| PF080 | SSAP | recT | Ahrensia sp R2A130 | MNAIARLESGIDRSISNEIAVGSSGLTFQNAGQIMEYAKMMAVS | 214 |
| | | | | GSAVPKHLRGNAGACLGIVDDALRFQMSPYALARKSYFVNDN | |
| | | | | LGYEAQVLAAIVISRSPLRERPNVNFEGEGQDRVCIVSATFNDG | |
| | | | | AEREVRSPAFKAITPKNSPLWKSDPDQQHSYYTLRAFARRHCP | |
| | | | | DVLLGMYDPEELSSMAARDVTPPRAPTAQERLKSIAAEKPAEP | |
| | | | | VLHNEGFGTGNMLEDAPASAVSEPEQSQADTGEIVDQQEQEPA | |
| | | | | PAVETRIEPERTTLNQDDKDVLTDFIIPFWKAESEEARKMVRM | |
| | | | | KHDPMIEARGKLATTAARKMVEAVIAGKPAEAGEVIGLTMQD | |
| | | | | MEELS | |
| PF081 | SSAP | recT | Borrelia duttonii CR2A | MTKNNILKNQSTNTVDVIIEKMNSSNIAEVWETYKIMHNLKKI | 215 |
| | | | | DAYSEREILTLLQVNKLNPFKKEAYIIPFNGRYTVVVAYQTLLI | |
| | | | | RAYEAGYNKYDLDFEEKLVKSLKIDSKGNKMIQEDWQCTAFF | |
| | | | | KSDDGIRYSFSVLLSEYFKNTPIWREKPVFMLRKCAVSCLCRTL | |
| | | | | PGSGLESMPYIREELEDMGTVLQQELQGFEEVNNSTPEATIEIQS | |
| | | | | VNHNSGDDINKSIPTKYYCYQNLLIAARNMYNFVSDKPFGSLS | |
| | | | | EINTYLESVKSGDDSKLLEYFNTNKMLKSIEYWCNLLKEYFTK | |
| | | | | SSRDLSRLEKFNIFMSFDLDKVGNSPLKLFSQLSITKEFQCLFSL | |
| | | | | T | |
| PF082 | SSAP | recT | Candidatus Accumulibacter sp | MSKTLRNLQKSRQGTPANAVSFPVMLEQFKGEIARALPRHLSP | 216 |
| | | | SK-12 | ERIVRVALTAFRLNPKLADVDPRSIFAAVIQSSQLGLEVGLMGE | |
| | | | | AHLVPFGSQCQLIPAYQGLMKLARNSGLVQDIYGHEVRINDRF | |
| | | | | DIVLGLHRSLMHEPLKQNGFPAADDERGAIVGFYVVAVFKDGT | |
| | | | | RTFYALSREQVEQVRDHSRGYQMARKLRKESPWDTHFVSMGL | |
| | | | | KTVIRRVCNLLPKSPELAMALAMDELNERGETQNLGVTEAIDG | |
| | | | | SWAPVLDEQPDDPGQASDPARASTRKPLADLLAGIGQALSLEA | |
| | | | | LDEVYAQAEDAVAGDDLERLLRAYRSRKAALTPPLSPSSPIRG | |
| | | | | VVNNASA | |
| PF083 | SSAP | recT | Bifidobacterium reuteri DSM | MGQLARSIQNRQLQAMPNDQERKQQFMTALEKDWPRIVASMP | 217 |
| | | | 23975 | KHMTPDRIFQMYQSTLSREPKLRECTLNSVLSCFMKCAQLGLE | |
| | | | | LSNADGLGKAYIIPFFNNKNNEMEATFLIGYRGMLQLARNSGEI | |
| | | | | KSMQAKAVYDGDEFHYQFGLHEDLVHIPAEKRPRNAKLTHVY | |
| | | | | FIALFKDGGHQLDVMTRDEVDAVRSRSKSKNNGPWVTDYEA | |
| | | | | MAIKSVIRRAFKMLPNSADVKEEVQQHVDAYTPDYSGILPSSPE | |
| | | | | GLPDSDADAPEEPSDIDGVLADGGTEQPAEEPDPVEVKRRDVIR | |
| | | | | RFQQLGVTSDAEACGTISKVLGREVKETGGLPEADEDVVLAQL | |
| | | | | KASVREGE | |
| PF084 | SSAP | recT | Serratia odorifera DSM 4582 | MSTEIIEQKKNGIIDNVSILTNGDLFDRLMKISEVMAKSGAMVP | 218 |
| | | | | QHFRDQPDACMAITMQAARWGMDPFVVAQKTHLVNGTLGYE | |
| | | | | AQLVNAIINSMAPTKDRIHFEWFGPWENILGCFVEKTGKSGNK | |
| | | | | YIAPGWSLADEKGVGVRAWATLKGEDEPRELVLYLSQAQVRN | |
| | | | | STLWASDPRQQLAYLSVKRWARLYCPDVILGIYSDDELLEPTP | |
| | | | | RAEKDITPVASAVTELDSPPTSTEPDAGKAAELAEALSAALDEA | |
| | | | | STQEEAATIEQRIAKHKDALGSSLLFSLRGKAQKKRSGFRGVSE | |
| | | | | IDAAFSALDGTDNQKFQQLETLVANWKNALPPADVERFTLAL | |
| | | | | DDLRPEYQQ | |
| PF085 | SSAP | recT | Persephonella marina (strain DSM | METKTLAPPTALMGNVDYDKLMQQAGQLILRDREGKPYTNEQ | 219 |
| | | | 14350/EX-H1) | RALIVLAAQQLGLNPILGHLTIIQDRLYITNAGLLHIAHNSGKLQ | |
| | | | | GIKTRPATEEERKAYFLGNNPKDIHLWRAEVYLKGQKEPYIGW | |
| | | | | GKASTNEKSWAVKSNPQEMAETRAVNRALRKAFNVAGYTSV | |
| | | | | EEIDEEPQFINEEDDEEPITQEQVKILHAIANLISKDFYDHEFKN | |
| | | | | WLREKTGKESSKELTKSEASDIADRLLTVLEDKLKFLADEAGIN | |
| | | | | YYKLLNDKYSIGTLSETDNYYIWKEVRDYIEEAYKRKGLLKSIL | |
| | | | | EVAQEKNISNEEIKQIIFKEFGKESSKQLTIDELERLLNIVENI | |
| | | | | SFEPSDEDVPF | |
| PF086 | SSAP | recT | Parcubacteria group bacterium | MSNFQNAVAIIAKQESKFMELVKAASTDVVFKQEMLYASQAM | 220 |
| | | | GW2011_GWA2_42_14 | MNNDYLCKTAINNPLSLRNAFESQVAACGLTLNPSRGLCYLVPR | |
| | | | | DGQVILDVSYKGMIKTAVNDGAIRDCIVELVYSNDKFVYKGKR | |
| | | | | HSPVHEFDPFDLKEQRGEFRGVYVEVTLPDGRVHVEAVTAVDI | |
| | | | | YKARNASDLWTRKKKGPWVDFEDSMRKKSGIKIAKKYWPQV | |
| | | | | GEKLDSVIHYLNTDAGEGFASQDVPVSVVERYMGQVEQVEPA | |
| | | | | EPLPTSNETVPVVASVAVAEQAAATQSQPTPESEAKAPLQGTV | |
| | | | | DPNVEAAESALPERTLNKVEELVKRARNSGAWKAAHEYISTW | |
| | | | | PEIARDYATKKLKAAEYQLAASGE | |
| PF087 | SSAP | recT | Xanthobacter autotrophicus | MNALAPINVQSSAIRAMVPQTMDEVFHLADAVHRSGLAPTGL | 221 |
| | | | (strain ATCC BAA-1158/Py2) | KNVQAVAIAIMTGLELGVPPMTALQRIAVINGRPTIWGDLAIAL | |
| | | | | VRASGLAETIKEEILGEGDDRVAICTVKRKGDPQQVVGSFSVA | |
| | | | | DAKRARLWDPREKVQRRRQDGNGTYEALNDAPWHRFPERM | |
| | | | | MKMRARAFALRDGFADVLGGLYLREELEEEQVDIRDVTPPTAP | |
| | | | | PPTITEEKKAPAPPAPAPAALAPPDPHVDLPSPLDRVTTPEVRD | |
| | | | | MVLNSPSAPAGLAQKAPAPPPPSVASVPAREERAPSPGEGAPRP | |
| | | | | DRAPSPAPFPNMAPHLVSLWAELGKCQNPTALENTWAFEEDDI | |
| | | | | NTWSMADRESAAALYERRLAELCRKG | |
| PF088 | SSAP | recT | Ruminococcus sp SR1/5 | MANEMTVQKTESLSNSEAFTNKVLKEFGSNVAGNIQVTDYQR | 222 |
| | | | | QLIQGYFIATDRALKMAEEKRVSKNENNKDHKWDNLDPINWN | |
| | | | | TVDLNALALDVVHYARMGLDMMQDNHLSAIPFKDNNRLSRT | |
| | | | | GTKMYVVNLMPGYNGIQYIAEKYALEKPVSVTVELVYSTDTF | |
| | | | | KPLKKNRENRVESYDFEINNAFDRGEIVGGFGYIEYTEPTKNKL | |
| | | | | IIMTIKDILKRKPDKASGEFWGGKKTAWEKGQKVEVETEGWFE | |
| | | | | EMCLKTVKREVYSAKNMPRDPKKIDDAYEYMRMQEIRLAQM | |
| | | | | ETQEVIDAEANQVVIDTEAQETPQKPAQPAFLTDDGGQQALDL | |
| | | | | GSPAKPQAQPQPARNTTAARSTATRAAGPTF | |
| PF089 | SSAP | recT | Sulfurovum sp ES06-10 | MSKNEVTHVSQGQGAMIKSPFSAYALTEEQSNIIKTQIAPGITD | 223 |
| | | | | GDLMYCLEIAKQAQLNPIIKEIYFVPRRSKIDNQWVTKHEPMIG | |
| | | | | RKGARSIARRKGMIVPPTTGYTLKQFPFLENGEWKEKRDLIGW | |
| | | | | AELEITGQKVRKEAAYSVFVQKTSEGAVTKFWSTMPTVMIEKV | |
| | | | | AEFQLLDAVYGLDGLMYMDAGYIEDESSSTQEMSSLADLGKIE | |
| | | | | RELKSLNLEYHLVGDEIRIQDKGAFQFAAALKKEGFVYENSTK | |
| | | | | FWKIRVAMVENADIEAPKELPKPEPEQIDPKKELANAKKALMK | |
| | | | | VLLGNGLTKEEAGEFAQTLDVSNVDSINKLLPGNGGHDELIAKI | |
| | | | | NVFLTPQSSQTHQDNLFDGDEEENPFG | |
| PF090 | SSAP | recT | Microgenomates group bacterium | MEVKNELAIQFDKTKAVMRSEQAIERFAEALGSGQQAKRFIGS | 224 |
| | | | GW2011_GWF1_44_10 | VLLVVSQSDRLMECTPQSIMVSGVRAATLKLSVDPSLGHAVIV | |
| | | | | PYKNKGIPTATFIIGYKGLKQLAYRTGQYAFINEKIVYDGQTIEE | |
| | | | | DDFSGIQRVRGIPTTYGKDGWKPIGYWMGFELKNGFRQTFYM | |
| | | | | TIEEVEAHAKRYSKTYDKVKKQFYPDSLWHTDFDVMAIKTVIR | |
| | | | | LGLSKYGYFDEDSLLAMAESSEFDDDLVVDGELIEDALEQEAE | |
| | | | | REQAREAEHAGKSTEQLSSLLGFEDPPDTSKKEPVKKAAAKEA | |
| | | | | VTKVKPKEYEVAASFNSKRLNKLYGEMSVEELQGEIMALTQY | |
| | | | | ETKTQEEKVQVNDRIQAAKELIRYIESNVL | |
| PF091 | SSAP | recT | Mycobacterium marinum (strain | MTEIATIDETTTDLIRGQVGFNSTQRAMLAQLGLSDAPEGDLIL | 225 |
| | | | ATCC BAA-535/M) | FSHVCQKSGLDPFRREIFMIGRNTQVTRYEKVDPDDPESNQRK | |
| | | | | VTRWETVYTIQTGIQGFRKRARELADEKGDRLGFDGPYWCGE | |
| | | | | DGNWKEIWPDTDKPVAAKYIVFRNGEPVPAVTHYSEYVQTTK | |
| | | | | VDGVAQPNSMWSKMPRNQLAKCAEALALQRAYPDELSGIVLE | |
| | | | | DAAQVIDSDGQIINETQRPPARARGAAALRDRAKAEAKPDDPE | |
| | | | | AVNADVVEPRHEDVASQPRPMSDGSRRKWLNRMFQLLGESDC | |
| | | | | TEQESQLTVIAKLANAPGIEHRDQLDDGQLKGVVNQLNQWEK | |
| | | | | SGQLVDKVADILDQAAIDEAQAAEQDAQQTIDGGN | |
| PF092 | SSAP | recT | Mameliella alba | MNTQIAKIPLRQVQDVKTLLHNDQARQQLAAVAAKHMSPERL | 226 |
| | | | | MRVTANAIRTTPKLQEADPLSFLGALMQCAALGLEANTVLGH | |
| | | | | AYLVPFKNNRKGITEVQVIIGYKGFIDLARRSGHITSISAGIHYS | |
| | | | | DDELWEHEEGTEARLRHRPGPQEGEKLHAYAIAKFTDGGHAY | |
| | | | | VVLPWARVMKIRDGSQNWQSAVKFGKTKQSPWYTHEDAMAS | |
| | | | | KTAIRALAKYLPLSVEMADAITIDHDEGTRVDYAAFAQSPEDG | |
| | | | | PQVEEGEEIDGEATEVDEGDRHQQDADPKGATGETEEKPNQKT | |
| | | | | KERKPEAKKEQDKPKDDDAGIPPASDPKFVKLFQDIEAELTDG | |
| | | | | APARGILRFHEAALAEVEKEDPDLHGQIMSMIREAEAND | |
| PF093 | SSAP | recT | Gordonia soli NBRC 108243 | MSSTEIATTTGAVATQPTSDLAIQPNQTEFTSVQRAALAQLGIE | 227 |
| | | | | EATDEDVQVFFHQAKRTGLDPFARQIYMIGRRTKVKEWDPNQ | |
| | | | | RKQIEKWVMKQTIQIGIDGYRLGGRRIASALGIKLEKDGPHWH | |
| | | | | DGNGWVDVWLDPARPPAAARYSITRDGETFTATAMYSEYVQT | |
| | | | | YNTQQGPQPNSMWSKMPANQLAKCAEAAAWRQAFPDQFSGV | |
| | | | | IFEDAAQHTVIDADVIEEEPKTKQGSRGTAGLAAALGVDESTA | |
| | | | | DEPEPQDGPVGTIESGLISAEPSETPEDEADSSHEPRPEPKKPTQ | |
| | | | | KQIHALNALLSQAGLTKAEKKGRQIVVSSFLPNREDPAAALTA | |
| | | | | DETEHVTTQLSALVENQGEQALIDTVEALIQQHDQQGAE | |
| PF094 | SSAP | recT | Sphingopyxis sp (strain 113P3) | MNAQTQIATRADNPLAILKTQIDERAKEFQAALPSHISPEKFQR | 228 |
| | | | | TILTAVQADPELLKASRKSLILACMKAANDGLLPDRREAALIVE | |
| | | | | KRNYKDAQGAWQQALEVQYLPMVFGLRKKILQSKEVTDIKPN | |
| | | | | VVYRREVEEGHFIYEEGTEAMLRHKPILDLTDEESSDDNIVVAY | |
| | | | | SIATYKDGTKSYEVMRRFEINKVQNCSQTGALIDKRGKPRTPSG | |
| | | | | PWVDWYPEQAKKTVMRRHSKTLPQSGDLVDVEGSEIDQQRA | |
| | | | | ALSAMGALGAGEPIDATPVAPALPQADDLPDHDADTGEIIDTV | |
| | | | | TPDNPNAAEGRADEQHGDQHDGTEEPQGDEDQPYAATVSELIE | |
| | | | | RAAAAGTVIDLNAVEKDWQKHMAALPDVENARIDTAVKERR | |
| | | | | DQLTAK | |
| PF095 | SSAP | recT | Actinobacteria bacterium OK074 | MTVDTPVTWLAIREDQKAFEDQQLRALRAAFPDLVDASPAQL | 229 |
| | | | | GIFFHYCKASGLDPFGRQIYMIKRKSRGEVRWTIQTGIDGYRLI | |
| | | | | ARRAADRAGQSIAYEDEFVWYDAEGGEHAVWLRDEPPVACRV | |
| | | | | VIWRGEARFPAVAHWREYAPKVWDYEAQEYKLGGLWPQMP | |
| | | | | ASQFGKVAEALSLRRACPADLSGLHVDEEMHAADAAESRERV | |
| | | | | KEAAARLRSPDEQQANGGSPAQPTSDVVDAEIVESQTANTDAA | |
| | | | | APQEEQRADKAAEPPASGRTDEVDRVRERMSALDQERSRLEE | |
| | | | | ARARIRETADRLALGFDTVNDRCFDAFGTSFQDASAEQLSELN | |
| | | | | DSLTPAAGTSDEPATAGRRNGSARRTRTPAKKAAASAKKKTA | |
| | | | | RKATDGTTSPTRVSK | |
| PF096 | SSAP | recT | Rhizobium sp CF080 | MNSLTTVEAGRLIDGLRVELEPLVLDSGKSFDRLRSVFMIAVQ | 230 |
| | | | | QNPDILKCSENSIKREISKCAADGLVPDNKEAAMIPYKGELQYQ | |
| | | | | PMVQGIIKRMKELGGVFNIVCNLVFEKDVFTLDESDPDSLSHVS | |
| | | | | DRFATDRGKVVGGYVVFRDEHKRVMHLETMSIVDFENVRKAS | |
| | | | | KAPDSPAWKNWTNEMYKKAVLRRGAKYISVNNDKIRALLER | |
| | | | | QDELFDFTPNRVVERTNPFTGEVIEGNATPSIENKQQPPMQQPR | |
| | | | | ETQPAGSQQEPRQQRINNTGDGRASRKQERQPENKDAGNTQQ | |
| | | | | TKTETKKDLVPPAVPEVDVFPADKAKAAEAAEKLLGVALLPD | |
| | | | | LDPRGRRGVLKQAAVDWKEATPAYTHPLLKACIDMSDWAIQQ | |
| | | | | QVKEEAWAGEHAMFVHKIKSLLDVEKLNVGKYP | |
| PF097 | SSAP | recT | Bradyrhizobium sp STM 3843 | MNSARGWWLDKNLVKLARRTAFKETNEDEFDQAVAFCREKN | 231 |
| | | | | LSPMSGQLYAFVFNKDDAKKRNMVIVTSIMGYRAIANRSGDY | |
| | | | | MPGPTKAFFDPGAKNSLINPRGLVRAEGGADRFIHGGWKNVTE | |
| | | | | EALWESFAPIIKSGSDDDAYEWVDTGEVWADSGKPKKKRRLR | |
| | | | | QGAEVQEILDPKKEGWHRMPDVMLKKCAEAAALRRGWPEDL | |
| | | | | SGLYVEEEVHRSQVIDADYVDLTPSEMVAKAETDARIEKIGGPS | |
| | | | | IFAAFDAAGTLERVEIGKFFDRVDAHTRNLKPEDVASFAVRNR | |
| | | | | EALREFWGRAKNDALTLKTILETRSSAATPASQANGHDGAAGT | |
| | | | | AAPRSESQTDSGPDTGAADPSLSSDAAAKLKSALLADVAQLRT | |
| | | | | RSDFDSWERDAKAHLEKLPEQMRSEVQAELDHRRADIR | |
| PF098 | SSAP | recT | Nitratireductor basaltis | MNQIATSTQRELAEKDKFRQQMKGQSEAFCEALIGSNIPPEKFQ | 232 |
| | | | | RVVATAVMTDTNILFADRKSLMEATMRAAQDGLLPDKREGAF | |
| | | | | VLFKNRVQWMPMIGGIIKKIHQSGDISLITAKVVYGGDTYRTW | |
| | | | | VDDEGEHVLYEPAEEPDHNVIRQVFAMAKTKDGTLYVEALTT | |
| | | | | RDIEKIRSVSRSGEKGPWKDWWEEMAKKSAIRRLAKRLPLSSD | |
| | | | | IHDLIQRDNEMYDESRAPEPRQSVMARFRASATPQIEMDRGEG | |
| | | | | FDIDHITRETGTLTSEDAEQVSSASPSLADEGDGADPAPETPSTV | |
| | | | | ATESEPAEAADQAEEASTEQASTPEASHGDEAGASSAVNPQTY | |
| | | | | AAMTECIDRLLGAATDTSGGDVEKRKEKVEKFAAAWCNELPD | |
| | | | | HTAFVDKCKDTALRIAEKPAERAKAEEYLKAKLPEVEA | |
| PF099 | SSAP | recT | Lentibacillus amyloliquefaciens | MEKAIQFSNSEKSLIWKRFIEPAKGTQEEAEHFLEVCENFGLNP | 233 |
| | | | | LLGDIVFQRYETKRGAKTQFITTRDGLELRVATSQPGYVGPPNA | |
| | | | | NVVKEGDHFEFLPSEGTVRHKFGTKRGQILGAYAIMQHKKHNP | |
| | | | | VAVFVDFEEYELANSGRQNSRYGNPNVWDTLPSAMIIKIAETF | |
| | | | | VLRRQFPLGGLYTQEEMGLDDNLQTEDAKETASPDKQHSAQT | |
| | | | | KPAAKEPEKEVSQPGDDVIHQEMVVKSYDIKTSSSKKQVGVLS | |
| | | | | VQSKTSNQAVQVLIRDKSLMKSLQHVSAGEILNLELYEENSFVF | |
| | | | | LKDVAERASVDNQQKDEKEENQKGESSKETDGPAKAPQENEQ | |
| | | | | SEAGYPVEVMIQNVKFGEKASEKFAKITGVIDGQTQLMLARGE | |
| | | | | QAVQKADGLEQGDNVTLSLKKENGFLFLVDLVEETQQRAG | |
| PF100 | SSAP | recT | Oligotropha carboxidovorans | MAKTETRERTQADHRSAEPAPNVNVPAQKSNHPVAVFREYAM | 234 |
| | | | (strain ATCC 49405/DSM 1227/ | QRISTLQELPHIDPQQLLSVALTAIQRKPDLMRCTPQSLWNACV | |
| | | | KCTC 32145/OM5) | LAAQDGLLPDGREGAIVPYGENADGKRVAEIATWMPMVEGLR | |
| | | | | KKVRNSGQIKDWYVELVYAGDFFRYRKGDDPRLEHEPVPPSQ | |
| | | | | RTPNTPFHGIVAAYSIAVFTDGSKSAPEVMWIEEIEKVRTKSKA | |
| | | | | KNGPWQDSAFYPEMCKKVVARRHYKQLPHSAGMDKLIQRDD | |
| | | | | DDYDFDRQDEALVQQRQHRRLVSTTSAFDEFARNGQTIDHRAS | |
| | | | | DPVHQDGDDEFAEDEPSHDETGADETDRTSANSKPETGGAAD | |
| | | | | QREEAAVNSKDEQQQHAEPQQQTQAEQTTANDGKPAAKFDPH | |
| | | | | VGEEVRRWPPGAVPSDPDEYEFYVETKLSDYTRETADKIPDW | |
| | | | | WKSAEEKKLREACGISKQRHDELRNKAASRKTELLKG | |
| SSB_01 | SSB | Viral- | Streptococcus pyogenes serotype | MINNVVLVGRMTKDAELRYTPSQVAVATFTLAVNRTFKSQNG | 235 |
| | | SSB | M28 (strain | EREADFINCVIWRQPAENLANWAKKGALIGVTGRIQTRNYENQ | |
| | | | MGAS6180), Streptococcus | QGQRVYVTEVVADNFQMLESRATREGGSTGSFNGGFNNNTSS | |
| | | | pyogenes, Temperate phage | SNSYSAPAQQTPNFGRDDSPFGNSNPMDISDDDLPF | |
| | | | phiNIH11, Streptococcus pyogenes | | |
| | | | serotype M2 (strain | | |
| | | | MGAS10270), Streptococcus | | |
| | | | pyogenes serotype M3 (strain | | |
| | | | ATCC BAA-595/ | | |
| | | | MGAS315), Streptococcus | | |
| | | | pyogenes STAB902 | | |
| SSB_02 | SSB | Bacterial- | Streptococcus pyogenes | MINNVVLVGRMTKDAELRYTASQVAVATFTLAVNRRFKEQNG | 236 |
| | | SSB | STAB902, Streptococcus | EREADFINCVIWRQSAENLANWAKKGALIGVTGRIQTRNYENQ | |
| | | | pyogenes, Streptococcus pyogenes | QGQRVYVTEVVADNFQMLESRNQQSGQGNSSQNDNSQPFGNS | |
| | | | serotype M3 (strain ATCC BAA- | NPMDISDDDLPF | |
| | | | 595/MGAS315) | | |
| SSB_03 | SSB | Bacterial- | Bacillus subtilis | MLNRVVLVGRLTKDPELRYTPNGAAVATFTLAVNRTFTNQSG | 237 |
| | | SSB | | EREADFINCVTWRRQAENVANFLKKGSLAGVDGRLQTRNYEN | |
| | | | | QQGQRVFVTEVQAESVQFLEPKNGGGSGSGGYNEGNSGGGQY | |
| | | | | FGGGQNDNPFGGNQNNQRRNQGNSFNDDPFANDGKPIDISDD | |
| | | | | DLPF | |
| SSB_04 | SSB | Bacterial- | Saccharomyces cerevisiae (strain | MSSVQLSRGDFHSIFTNKQRYDNPTGGVYQVYNTRKSDGANS | 238 |
| | | SSB | ATCC 204508/S288c) (Baker\′s | NRKNLIMISDGIYHMKALLRNQAASKFQSMELQRGDIIRVIIAEP | |
| | | | yeast), Saccharomyces cerevisiae | AIVRERKKYVLLVDDFELVQSRADMVNQTSTFLDNYFSEHPNE | |
| | | | YJM1250, Saccharomyces | TLKDEDITDSGNVANQTNASNAGVPDMLHSNSNLNANERKFA | |
| | | | cerevisiae YJM451 | NENPNSQKTRPIFAIEQLSPYQNVWTIKARVSYKGEIKTWHNQR | |
| | | | | GDGKLFNVNFLDTSGEIRATAFNDFATKFNEILQEGKVYVVSK | |
| | | | | AKLQPAKPQFTNLTHPYELNLDRDTVIEECFDESNVPKTHFNFI | |
| | | | | KLDAIQNQEVNSNVDVLGIIQTINPHFELTSRAGKKFDRRDITIV | |
| | | | | DDSGFSISVGLWNQQALDFNLPEGSVAAIKGVRVTDEFGGKSLS | |
| | | | | MGFSSTLIPNPEIPEAYALKGWYDSKGRNANFITLKQEPGMGG | |
| | | | | QSAASLTKFIAQRITIARAQAENLGRSEKGDFFSVKAAISFLKVD | |
| | | | | NFAYPACSNENCNKKVLEQPDGTWRCEKCDTNNARPNWRYIL | |
| | | | | TISIIDETNQLWLTLFDDQAKQLLGVDANTLMSLKEEDPNEFTK | |
| | | | | ITQSIQMNEYDFRIRAREDTYNDQSRIRYTVANLHSLNYRAEAD | |
| | | | | YLADELSKALLA | |
| SSB_05 | SSB | Bacterial- | Saccharomyces cerevisiae | MATYQPYNEYSSVTGGGFENSESRPGSGESETNTRVNTLTPVTI | 239 |
| | | SSB | | KQILESKQDIQDGPFVSHNQELHHVCFVGVVRNITDHTANIFLTI | |
| | | | | EDGTGQIEVRKWSEDANDLAAGNDDSSGKGYGSQVAQQFEIG | |
| | | | | GYVKVFGALKEFGGKKNIQYAVIKPIDSFNEVLTHHLEVIKCHS | |
| | | | | IASGMMKQPLESASNNNGQSLFVKDDNDTSSGSSPLQRILEFCK | |
| | | | | KQCEGKDANSFAVPIPLISQSLNLDETTVRNCCTTLTDQGFIYPT | |
| | | | | FDDNNFFAL | |
| SSB_06 | SSB | Bacterial- | Saccharomyces cerevisiae | MASETPRVDPTEISNVNAPVERIIAQIKSQPTESQLILQSPTISS | 240 |
| | | SSB | | KNGSEVEMITENNIRVSMNKTFEIDSWYEFVCRNNDDGELGFLI | |
| | | | | LDAVLCKFKENEDLSLNGVVALQRLCKKYPEIY | |
| SSB_07 | SSB | Viral- | Staphylococcus phage phi11 | MKITGRTQYIQETNQEAFMKGGDFLGAGEFTVKVANVEFNDR | 241 |
| | | SSB | (Bacteriophage phi11), | ENRYFTIVFENNEGKQYKHNQFVPPFQQDYQEKQYIELLSREGI | |
| | | | Staphylococcus phage | KLNLPDLTFDTDQLINKIGTIVLKNKFNEEQGKVFVRLSYVKV | |
| | | | 80, Staphylococcus phage | WNKDDEVVNKPEPKTDEMKQKEQQANGKQTPMSQQSNPFAN | |
| | | | 52A, Staphylococcus aureus | ANGPIEINDDDLPF | |
| | | | (strain NCTC 8325) | | |
| SSB_08 | SSB | Viral- | Salmonella typhimurium, | MASRGVNKVILVGNLGQDPEVRYMPSGGAVANLTLATSESWR | 242 |
| | | SSB | Salmonella phage | DKQTGEMKEQTEWHRVVMFGKLAEVAGEYLRKGSQVYIEGQ | |
| | | | ST160, Salmonella phage ST64T | LRTRKWTDQSGQERYTTEINVPQIGGVMQMLGGRQGGGAPAG | |
| | | | (Bacteriophage ST64T) | GQQQGGWGQPQQPQQPQGGNQFSGGAQSRPQQSAPAPSNEPP | |
| | | | MDFDDDIPF | | |
| SSB_09 | SSB | Bacterial- | Enterococcus faecalis | MINNVVLVGRLTKDPDLRYTASGSAVATFTLAVNRNFTNQNG | 243 |
| | | SSB | TX0309B, Enterococcus faecalis | DREADFINCVIWRKPAETMANYARKGTLLGVVGRIQTRNYEN | |
| | | | TX0309A, Enterococcus faecalis | QQGQRVYVTEVVCENFQLLESRSASEQRGTGGGSFNNNENGY | |
| | | | (strain ATCC 700802/V583) | QSQNRSFGNNNASSGFNNNNNSFNPSSSQSQNNNGMPDFDKDS | |
| | | | | DPFGGSGSSIDISDDDLPF | |
| SSB_10 | SSB | Viral- | Acyrthosiphon pisum secondary | MASRGVNKVILIGHLGQDPEVRYMPNGNAVVNMTLATSENW | 244 |
| | | SSB | endosymbiont phage 1 | KDKNTGENKEKTEWHRIVLFGKLAEIAGEYLRKGSQVYIEGSL | |
| | | | (Bacteriophage APSE-1) | QTRKWQDQNGLERYTTEIIVNIGGTMQMLGNRNSNLQAMTVNDK | |
| | | | | NSTGIKIKKTDAVEFDKKIETHESNKDLTHSPSEIDEDDEIPF | |
| SSB_11 | SSB | Viral- | Bacillus phage SPP1 | MNSVNLVGRLAADPELRHTNNGTAVVNFIMAVRRNRKDPTTG | 245 |
| | | SSB | (Bacteriophage SPP1) | QYEADFIRCQAWRGIAEVIANNFGTGRMIGVSGSWRTGAFEGQ | |
| | | | | DGKRVYTNDCVVENITFVDPNKSDSSSPDNSQGSSNTNTFGGS | |
| | | | | QNGSGGQGGYNNDPFANDGKTIDINESDLPF | |
| SSB_12 | SSB | Viral- | Lactococcus phage LL-H | MAGINNVVLVGRLTKDVNLRSTQSGTMVGTFTLAVDRTTKDQ | 246 |
| | | SSB | (Lactococcus delbrueckii | NGNRQADFIKCVVWNNKYSKMAENLATYAHKGSLIGVQGRIQ | |
| | | | bacteriophage LL-H) | TRNYDNKDGQRVDVTEVRVDNFSLLESRNSAQREYTGQQGGY | |
| | | | | SQQQGNQPQGNYQASQAANFGQQGQFTAPAGQSDTIDVSNDD | |
| | | | | LPF | |
| SSB_13 | SSB | Viral- | Escherichia phage Rtp | MAQRGVNKVILIGTLGQDPEIRYIPNGGAVGRLSIATNESWRDK | 247 |
| | | SSB | | QTGQQKEQTEWHKVVLFGKLAEIASEYLRKGSQVYIEGKLKTR | |
| | | | | KWTDDAGVERYTTEIIVSQGGTMQMIGARRDDSQSSNGWGQS | |
| | | | | NQPQNHQQYSGGGKPQSNANNEPPMDFDDDIPF | |
| SSB_14 | SSB | Viral- | Streptococcus phage 7201 | MINNTVLVGRLTKDPEFKYTGSNIAVASFSLAVNRNFKDANGE | 248 |
| | | SSB | | READFINCVIWRQQAENLANWAKKGALIGITGRIQTRSYENQQ | |
| | | | | GQRVYVTEVVAENFQMLESRAAREGGNANNSYSQQQVPNFA | |
| | | | | RKNTEYSNKQPLDISSDDLPF | |
| SSB_15 | SSB | Viral- | Bacillus phage 0305phi8-36 | MSNELKQVEQTEEAVVVSETKDYIKVYENGKYRRKAKYQQLN | 249 |
| | | SSB | | SMSHRELTDEEEINIFNLLNGAEGSAVEMKRAVGSKVTIVDFIT | |
| | | | | VPYTKIDEDTGVEENGVLTYLINENGEAIATSSKAVYFTLNRLL | |
| | | | | IQCGKHADGTWKRPIVEIISVKQTNGDGMDLKLVGFDKKK | |
| SSB_16 | SSB | Viral- | Listeria phage A118 | MMNRVVLVGRLTKDPDLRYTPAGAAVATFTLAVNRMFTNQN | 250 |
| | | SSB | (Bacteriophage A118) | GEREADFINCVVWRKPAENVANFLKKGSMAGVDGRVQTRNY | |
| | | | | EDNDGKRVFVTEVVAESVQFLEPKNNNVEGATSNNYQNKANY | |
| | | | | SNNNQTSSYRADTSQKSDSFASEGKPIDINEDDLPF | |
| SSB_17 | SSB | Viral- | Lactococcus phage | MINNVTLVGRITKEPELRYTPQNKAVATFTLAVNRAFKNANGE | 251 |
| | | SSB | bIL286, Lactococcus lactis | READFINCVIWGKSAENLANWTHKGQLIGVTGSIQTRNYENQQ | |
| | | | subsp lactis (strain IL1403) | GQRVYVTEVIANNFQVLEKSNQANGERVSNPAAKPQNNDSFG | |
| | | | (Streptococcus lactis) | SDPMEISDDDLPF | |
| SSB_18 | SSB | Viral- | Lactococcus phage | MAIITVTAQANEKNTRTVSTAKGDKKIISVPLFEKEKGSSVKVA | 252 |
| | | SSB | SK1833, Lactococcus phage SK1 | YGSAFLPDFIQLGDTVTVSGRVQAKESGEYVNYNFVFPTVEKV | |
| | | | | FITNDNSSQSQAKQDLFGGSEPIEVNSEDLPF | |
| SSB_19 | SSB | Viral- | Mycobacterium phage Che8/ | MAGDTTITVVGNLTADPELRFTPSGAAVANFTVASTPRMFDRQ | 253 |
| | | SSB | Mycobacterium smegmatis | SGEWKDGEALFLRCNIWREAAENVAESLTRGSRVIVTGRLKQR | |
| | | | | SFETREGEKRTVVEVEVDEIGPSLRYATAKVNKASRSGGGGGG | |
| | | | | FGSGGGGSRQSEPKDDPWGSAPASGSFSGADDEPPF | |
| SSB_20 | SSB | Bacterial- | Ureaplasma urealyticum serovar | MNKVILIGNLVRDPEARQIPSGRLVTNFTIAVNDNTPNANANFI | 254 |
| | | SSB | 10 (strain ATCC 33699/Western), | RCVAWNNQANFLTTYLKKGDAIAIEGRIVSRSYVDNNGKTNY | |
| | | | Ureaplasma urealyticum | VTEVYADQVQSLSRRNQSPSDNNKVNVDTMMESYTGINTDAA | |
| | | | serovar 7 str ATCC | FSSNKPQTTLSSTTSNLNKNNDEEDEITSWINLDDDLE | |
| | | | 27819, Ureaplasma parvum serovar | | |
| | | | 3 (strain ATCC | | |
| | | | 700970), Ureaplasma urealyticum | | |
| | | | serovar 8 str ATCC | | |
| | | | 27618, Ureaplasma urealyticum | | |
| | | | serovar 4 str ATCC 27816 | | |
| SSB_21 | SSB | Viral- | Lactococcus lactis subsp lactis | MINNVVLVGRITRDPELRYTPQNQAVATFSLAVNRQFKNANGE | 255 |
| | | SSB | bv diacetylactis str | READFINCVIWRQQAENLANWAKKGALIGVTGRIQTRNYENQ | |
| | | | TIFN2, Lactococcus lactis subsp | QGQRVYVTEVVADSFQMLESRSAREGMGGGTSAGSYSAPSQS | |
| | | | lactis (strain IL1403) | TNNTPRPQTNNNNATPNFGRDADPFGSSPMEISDDDLPF | |
| | | | (Streptococcus lactis), | | |
| | | | Lactococcus phage bIL309 | | |
| SSB_22 | SSB | Bacterial- | Rhizobium loti (strain | MAGSVNKVILVGNLGADPEIRRLNSGEPVVNIRIATSESWRDK | 256 |
| | | SSB | MAFF303099) (Mesorhizobium | NSGERKEKTEWHNVVIFNEGIAKVAEQYLKKGMKVYVEGQLQ | |
| | | | loti) | TRKWQDQTGADKYTTEVVLQRFRGELQMLDGRQGEGGQVGG | |
| | | | | YSGGGSSRGSDFGQSGPNESFNRGGGAPRGGGGGGSSRELDDE | |
| | | | | IPF | |
| SSB_23 | SSB | Bacterial- | Homo sapiens (Human) | MVDMMDLPRSRINAGMLAQFIDKPVCFVGRLEKIHPTGKMFIL | 257 |
| | | SSB | | SDGEGKNGTIELMEPLDEEISGIVEVVGRVTAKATILCTSYVQF | |
| | | | | KEDSHPFDLGLYNEAVKIIHDFPQFYPLGIVQHD | |
| SSB_24 | SSB | Bacterial- | Homo sapiens (Human) | MVGQLSEGAIAAIMQKGDTNIKPILQVINIRPITTGNSPPRYRL | 258 |
| | | SSB | | LMSDGLNTLSSFMLATQLNPLVEEEQESSNCVCQIHRFIVNTLK | |
| | | | | DGRRVVILMELEVLKSAEAVGVKIGNPVPYNEGLGQPQVAPPAP | |
| | | | | AASPAASSRPQPQNGSSGMGSTVSKAYGASKTFGKAAGPSLSHT | |
| | | | | SGGTQSKVVPIASLTPYQSKWTICARVTNKSQIRTWSNSRGEGK | |
| | | | | LFSLELVDESGEIRATAFNEQVDKFFPLIEVNKVYYFSKGTLKI | |
| | | | | ANKQFTAVKNDYEMTFNNETSVMPCEDDHHLPTVQFDEFTGID | |
| | | | | DLENKSKDSLVDIIGICKSYEDATKITVRSNNREVAKRNIVLMD | |
| | | | | TSGKVVTATLWGEDADKFDGSRQPVLAIKGARVSDFGGRSLS | |
| | | | | VLSSSTIIANPDIPEAYKLRGWFDAEGQALDGVSISDEKSGGVG | |
| | | | | GSNTNWKTLYEVKSENLGQGDKPDYFSSVATVVVLRKENCM | |
| | | | | YQACPTQDCNKKVIDQQNGLYRCEKCDTEFPNFKYRMILSVNI | |
| | | | | ADFQENQWVTCFQESAEAILGQNAAYLGELKDKNEQAFEEVF | |
| | | | | QNANFRSFIFRVRVKVETYNDESRIKATVMDVKPVDYREYGRR | |
| | | | | LVMSIRRSALM | |
| SSB_25 | SSB | Bacterial- | Homo sapiens (Human) | MWNSGFESYGSSSYGGAGGYTQSPGGFGSPAPSQAEKKSRARAQ | 259 |
| | | SSB | | HIVPCTISQLLSATLVDEVFRIGNVEISQVTIVGIIRHAEKAPT | |
| | | | | NIVYKIDDMTAAPMDVRQWVDTDDTSSENTVVPPETYVKVAG | |
| | | | | HLRSFQNKKSLVAFKIMPLEDMNEFTTHILEVINAHMVLSKAN | |
| | | | | SQPSAGRAPISNPGMSEAGNFGGNSFMPANGLTVAQNQVLNLI | |
| | | | | KACPRPEGLNFQDLKNQLKHMSVSSIKQAVDFLSNEGHIYSTV | |
| | | | | DDDHFKSTDAE | |
| SSB_26 | SSB | Bacterial- | Homo sapiens (Human) | MFRRPVLQVLRQFVRHESETTTSLVLERSLNRVHLLGRVGQDP | 260 |
| | | SSB | | VLRQVEGKNPVTIFSLATNEMWRSGDSEVYQLGDVSQKTTWH | |
| | | | | RISVFRPGLRDVAYQYVKKGSRIYLEGKIDYGEYMDKNNVRR | |
| | | | | QATTIIADNIIFLSDQTKEKE | |
| SSB_27 | SSB | Viral- | Enterobacteria phage T1 | MAKKIFTSALGTAEPYAYIAKPDYGNEERGFGNPRGVYKVDLT | 261 |
| | | SSB | (Bacteriophage T1) | IPNKDPRCQRMVDEIVKCHEEAYAAAVEEYEANPPAVARGKK | |
| | | | | PLKPYEGDMPFFDNGDGTTTFKFKCYASFQDKKTKETKHINLV | |
| | | | | VVDSKGKKMEDVPIIGGGSKLKVKYSLVPYKWNTAVGASVKL | |
| | | | | QLESVMLVELATFGGGEDDWADEVEENGYVASGSAKASKPRD | |
| | | | | EESWDEDDEESEEADEDGDF | |
| SSB_28 | SSB | Bacterial- | Escherichia coli | MASRGVNKVILVGNLGQDPEVRYMPNGGAVANITLATSESWR | 262 |
| | | SSB | | DKATGEMKEQTEWHRVVLFGKLAEVASEYLRKGSQVYIEGQL | |
| | | | | RTRKWTDQSGQDRYTTEVVVNVGGTMQMLGGRQGGGAPAG | |
| | | | | GNIGGGQPQGGWGQPQQPQGGNQFSGGAQSRPQQSAPAAPSN | |
| | | | | EPPMDFDDDIPF | |
| SSB_29 | SSB | Viral- | Mycobacterium phage PhatBacter, | MSKDLQVHLVGTLTADPELRFTQGGQAVANFTVVSNERRRDA | 263 |
| | | SSB | Mycobacterium phage Elph10, | QGNWVDGDATFLRCTIWRDAAENVAESLQKGQRVIVHGYLK | |
| | | | Mycobacterium phage 244, | QRSFETKEGDKRTVIEVEVDEIGPSLRWATARVSKVGGNSNGG | |
| | | | Mycobacterium phage Cjw1, | GSSSFKEADANKWGDDDVPF | |
| | | | Mycobacterium phage Phrux, | | |
| | | | Mycobacterium phage Lilac, | | |
| | | | Mycobacterium phage Phaux, | | |
| | | | Mycobacterium phage Quink, | | |
| | | | Mycobacterium phage Pumpkin, | | |
| | | | Mycobacterium phage Murphy | | |
| SSB_30 | SSB | Viral- | Bacillus thuringiensis | MMNRVILVGRLTKDPDLRYTPNGVAVATFTLAVNRAFANQQG | 264 |
| | | SSB | Sbt003, Escherichia coli\′BL21- | EREADFINCVIWRKQAENVANYLKKGSLAGVDGRLQTRNYEG | |
| | | | Gold(DE3)pLysS | QDGKRVYVTEVLAESVQFLEPRNGGGEQRGSFNQQPSGAGFG | |
| | | | AG\′, Enterobacteria phage | NQGSNPFGQSSNSGNQGNSGFTKNDDPFSNVGQPIDISDDDLPF | |
| | | | HK630, Enterobacteria phage | | |
| | | | lambda (Bacteriophage | | |
| | | | lambda), Escherichia coli | | |
| | | | TA280, Escherichia coli 1-176- | | |
| | | | 05_S3_C2, Escherichia coli 40967 | | |
| SSB_31 | SSB | Viral- | Bordetella phage BPP-1 | MASVNKVILVGNLGRDPEVRYSPDGAAICNVSIATTSQWKDKA | 265 |
| | | SSB | | SGERREETEWHRVVMYNRLAEIAGEYLKKGRSVYIEGRLKTR | |
| | | | | KWQDKDTGADRYSTEIVADQMQMLGGRDSGGDSGGGYGGG | |
| | | | | YDDAPRQQRAPAQRPAAAPQRPAPQAAPAANLADMDDDIPF | |
| SSB_32 | SSB | Viral- | Burkholderia phage BcepNazgul | MASVNKVILVGNLGADPEVRYLPSGDAVANIRLATTDRYKDK | 266 |
| | | SSB | | ASGDIKEATEWHRVSFFGRLAEIVDEHLRKGASVYIEGRIKTRK | |
| | | | | WQDQSGQDRYTTEIVADRMQMLGKPGGSRDDSGDQQQRQHG | |
| | | | | GQQQRGGGRNGYADATGRAQPQRTAEQRGASGFDDMDDSIPF | |
| SSB_33 | SSB | Bacterial- | Photorhabdus luminescens subsp | MASRGINKVILIGNLGQDPEVRYMPNGGAVTNITLATSESWRD | 267 |
| | | SSB | laumondii (strain DSM 15139/ | KQTGEMKEKTEWHRVVLFGKLAEVAGEYLRKGSQVYIEGSLQ | |
| | | | CIP105565/TT01) | TRKWQDQNGQERYTTEVVVNMGGTMQMLGGRAGGGSFQDS | |
| | | | | QQSQGGGWGQPQQPQPQQQSQQFSGGGAPSRPAQSSAPQSNE | |
| | | | | PPMDFDDDIPF | |
| SSB_34 | SSB | Bacterial- | Photobacterium profundum (strain | MELSMASRGVNKVILVGNLGNDPEIRYMPSGSAVANITIATSES | 268 |
| | | SSB | SS9) | WRDKATGEQREKTEWHRVALFGKLAEVAGEYLRKGSQVYIE | |
| | | | | GQLQTRKWQNQQGQDQYTTEVVVQGFNGVMQMLGGRQGGG | |
| | | | | QQQQQQQQQGNWGKPQQPAAAPQQSVAPQQQQQAPQQPQQ | |
| | | | | APQQPQQQYNEPPMDFDDDIPF | |
| SSB_35 | SSB | Viral- | Lactobacillus phage Lc-Nu | MAITMDYSQAAEGNGDIQDGVYECVINRFGFDNYKDREFIKED | 269 |
| | | SSB | | LIVRNDVPQKYQNKHIFDNFYPKKDTGEYAMGYLFMIGKNAGI | |
| | | | | PDHKAWSDLAAMLADFTGHAVKVTVKNEEYNGKTYPHIKKW | |
| | | | | EPTAFPQIQHRWKDSKDESSSNSNPSFGTPAQTSQTNTSDPFAN | |
| | | | | SGQPIDVSDDDLPF | |
| SSB_36 | SSB | Bacterial- | Leuconostoc mesenteroides subsp | MINRVVLIGRLTRDVELRYTQSGVAVGTFSLAVNRQFTNASGE | 270 |
| | | SSB | mesenteroides (strain ATCC 8293/ | READFINAVIWRKAAENFANFTGKGALVAVEGRLQTRNYENN | |
| | | | NCDO 523) | AGQRVYVTEVVVDNFSLLESRAESEKRRSQNGSSASNNGADNF | |
| | | | | SGSNDHSFGGNDNSFNGVDPFASASSNSNTQSSASSNSAPNPFA | |
| | | | | ASGNTEIDISDDDLPF | |
| SSB_37 | SSB | Viral- | Staphylococcus phage | MLNRTILVGRLTRDPELRTTQSGVNVASFTLAVNRTFTNAQGE | 271 |
| | | SSB | 3A, Staphylococcus phage | READFINIIVFKKQAENVNKYLSKGSLAGVDGRLQTRNYENKE | |
| | | | phi7401PVL, Streptococcus | GQRVYVTEVVADSIQFLEPKNSNDTQQDLYQQQVQQTRGQSQ | |
| | | | pneumoniae, Staphylococcus | YSNNKPVKDNPFANANGPIEENDDDLPF | |
| | | | aureus (strain NCTC | | |
| | | | 8325), Staphylococcus phage | | |
| | | | Phi12, Staphylococcus | | |
| | | | aureus, Staphylococcus phage | | |
| | | | 47, Staphylococcus phage tp310-2 | | |
| SSB_38 | SSB | Viral- | Escherichia phage Tls | MAVRGINKVILVGRLGKDPEVRYIPNGGAVANLQVATSETWR | 272 |
| | | SSB | | DKQTGEMKEQTEWHRVVLFGKLAEVAGEYLRKGAQVYIEGQ | |
| | | | | LRTRSWEDNGITRYVTEILVKTTGTMQMLGSAPQQNAQVQPQ | |
| | | | | PQQNGQSQSADATKKGSAKTKGRGRKAAQPEPQPQPPEGEDY | |
| | | | | GFSDDIPF | |
| SSB_39 | SSB | Bacterial- | Leifsonia xyli subsp xyli, | MAGETVITVVGNLTSDPELRYTQNGLAVANFTIASTPRTFDRQ | 273 |
| | | SSB | Leifsonia xyli subsp xyli | ANEWKDGEALFLRASVWRDFAEHVAGSLTKGSRVIAQGRLKQ | |
| | | | (strain CTCB07) | RSYETKEGEKRTSIELEIDEIGPSLRYATAQVTRAQSSRGPGG | |
| | | | | PGGFGGGAPAVEEPWAATVPADPSAGTDVWNTPGAYNDETPF | |
| SSB_40 | SSB | Bacterial- | Legionella pneumophila | MISMARGINKVILVGNVGADPDVRYLPNGNAVTTLSVATSET | 274 |
| | | SSB | | WKDKTTGEKQDRTEWHRVVCFNRLGEIAGEYIRKGSKLYVEG | |
| | | | | SLRTRKWQDQQGQDRYTTEIVASDIQMLDSKGSSATNYDDMP | |
| | | | | SFQGTSTPQQASTKNQATPTSTAQDAFDELDDDIPF | |
| SSB_41 | SSB | Bacterial- | Nocardia farcinica (strain IFM | MAGDTVITVIGNLTADPELRFTPAGQAVANFTVASTPRVFDRN | 275 |
| | | SSB | 10152) | TNEWKDGEALFLRCNIWREAAENVAESLTRGARVIVSGRLKQ | |
| | | | | RSYETREGEKRTVVELEVDEVGPSLRYATAKVNKASRGGGGG | |
| | | | | GGFGGGGGGGYASDRSGGGGSRSGAAEDDPWGSAPAAGSFG | |
| | | | | GGRMDDEPPF | |
| SSB_42 | SSB | Viral- | Streptococcus phage Sfi21 | MINNVVLVGRMTRDAELRYTPSNVAVATFSLAVNRNFKGANG | 276 |
| | | SSB | | ERETDFINCVIWRQQAENLANWAKKGALVGITGRIQTRNYENQ | |
| | | | | QGQRVYVTEVVADNFQMLESRAAREGHSGGSYNVGGFDNSN | |
| | | | | SFGGGASTGGSFGESQPAQSTPNFGRDESPFGNSNPMDISDDDL | |
| | | | | PF | |
| SSB_43 | SSB | Bacterial- | Campylobacter coli 80352 | MFNKVVEVGNLTRDIEMRYGQNGNAIGASAIAVTRRFTTNGER | 277 |
| | | SSB | | REETCFIDISFYGRTAEVANQYLSKGSKVLIEGRERFEQWNDQN | |
| | | | | GQMRSKHSVQVENMEMLGNNPQQGGNFNNGGNNYGANNNY | |
| | | | | SNYENQSYDPYMSENNFKKAPQQAQTKTQNPNQNQEKIKEID | |
| | | | | VDAYDSDDTDLPF | |
| SSB_44 | SSB | Viral- | Staphylococcus phage 92 | MLNRVVLVGRLTKDPEYRTAPNGVSVTTFTIAVNRTFTNAQGE | 278 |
| | | SSB | | READFINCVTFRKQAENVKNYLSKGSLAGVDGRLQTRNYENK | |
| | | | | DGQRVYVTEVVADSVQFLEPKNSNQQNNQQHNEQTQTGNNPF | |
| | | | | DNTTAITDDDLPF | |
| SSB_45 | SSB | Bacterial- | Pelobacter propionicus (strain | MASLNKVMLIGNLGRDPEVRYTASGQAVASFNLATTEKFKNR | 279 |
| | | SSB | DSM 2379/NBRC 103807/ | NGEWEERTEWHRVTLWARLAEIAGEYESKGKTVYIEGREQTR | |
| | | | OttBd1) | EYEKDGIKRYTTEIVGEKMQMLSPKGERRSSGDSYSPAPAGTS | |
| | | | | GGGYEPPPFQDDDIPF | |
| SSB_46 | SSB | Bacterial- | Clostridium beijerinckii (strain | MNKVVLIGRLTKDPELRFTPGSGAAVTTLTLAVDKYNTKTGQR | 280 |
| | | SSB | ATCC 51743/NCIMB 8052) | EADFVPVVVWGKQAESTANYMSKGSQVAISGRIQTRSYDAKD | |
| | | | (Clostridium acetobutylicum) | GTKRYVTEVVADQFGGVEFLGSKGSNSSGNSFGNSNEYSAPAN | |
| | | | | DAFSGGFEEDITPVDDGDMPF | |
| SSB_47 | SSB | Bacterial- | Sodalis glossinidius (strain | MASRGVNKVILVGNLGQDPEVRHMPNGGAVANITLATSESWR | 281 |
| | | SSB | morsitans) | DKQTGETKEKTEWHRVVLFGKLAEVAGEYLRKGSQVYIEGSL | |
| | | | | QTRKWQDQSGQDRYTTEVVVNVGGTMQMLGGRQGGAAASG | |
| | | | | GQQSGWGLPQQPQGNNAQFSGGNAPASRRAQNSAPAPSNEPP | |
| | | | | MDFDDDIPF | |
| SSB_48 | SSB | Bacterial- | Xanthobacter autotrophicus | MAGSVNKVILVGNLGRDPEIKSEQNGGRVCNLSVATSENWRD | 282 |
| | | SSB | (strain ATCC BAA-1158/Py2) | KASGERRERTEWHRVVIFNENLAGVAERFLKKGSKVYIEGQLE | |
| | | | | TRKYEKDGRETYTTEIVLRPYRGELTLLDGRGEGAGAGGDDY | |
| | | | | AAGSDFGSASPMGGGYGGGSGGSRRMSGAPAGSSGGVAGGG | |
| | | | | RPAADLDDEIPF | |
| SSB_49 | SSB | Viral- | Clostridium phage phiC2, | MNTITLVGRLVADAELKYLPNSGTPKITFSMAVDRRFKDKNGN | 283 |
| | | SSB | Peptoclostridium difficile | KITDFIQCEQLGKHVENLVQYLVKGKPIYAVGELNIYNYKDEN | |
| | | | E15, Clostridium phage | GCWKSITKVNVNALELLSSKNDNNAKQEYVPPGLDPQGFQAID | |
| | | | phiMMP03, Peptoclostridium | DDDIPF | |
| | | | difficile (Clostridium | | |
| | | | difficile) | | |
| SSB_50 | SSB | Viral- | Enterobacteria phage HK022 | MAQRGVNKVILIGTLGQDPEIRYIPNGGTVGRLSIATNESWRDK | 284 |
| | | SSB | (Bacteriophage HK022) | QTGQQKEQTEWHRVVLEGKLAEIASEYLRKGSQVYIEGKLKTR | |
| | | | | KWTDDAGVERYTTEIIVSQGGTMQMIGARRDDSQFSNGWGQS | |
| | | | | NQPQNHQQYSGGSKPQSNANSEPPMDFEDDIPF | |
| SSB_51 | SSB | Viral- | Mycobacterium phage Wildcat | MSKDLQVHLVGTLTADPELRFTQGGQAVANFTVVSNERRRDA | 285 |
| | | SSB | | QGNWVDGDATFLRCTIWRDAAENVAESLQKGQRVIVHGYLK | |
| | | | | QRSFETKEGDKRTVIEVEVDEIGPSLRWATARVSKVGGNSNGG | |
| | | | | GSSSFKEADANKWGDDEPPF | |
| SSB_52 | SSB | Viral- | Streptococcus phage MM1 | MINNVVLVGRLTRDAELRYTQSNIAVATFTLAVNRPFKNEAGE | 286 |
| | | SSB | 1998, Streptococcus pneumoniae, | READFINCVIWRQLAENLANWAKKGSLIGVTGVIQTRSYDNQQ | |
| | | | Streptococcus phage MM1 | GQRVYVTEVVASNFQLLESRNSQQNNQGHQDHHGGYQQQGY | |
| | | | | SNQGSSFQNGNSYGQQGSFVEGNTTNLVPDFTRDNNPFGRPTN | |
| | | | | PLDISDDDLPF | |
| SSB_53 | SSB | Viral- | Lactococcus phage c2 | MSINNVTLVGRLVRDPELKNTAQGIANVSFTLAVNRNYKNDQ | 287 |
| | | SSB | | GQREADFINVVIWRKQAELLAQYATKGALIGITGRIQTRNYEN | |
| | | | | QQGQRIYVTEVVADNFQLLESRGAQQGGQQQQQNQGYGQQQ | |
| | | | | NQRPQGNYQSNPRNNQQRQNQPDPFRGSPMEISDDDLPF | |
| SSB_54 | SSB | Bacterial- | Salinispora tropica (strain | MAGDTIITVIGNLTDDPELRFTPSGAAVAKFRVASTPRFFDKSS | 288 |
| | | SSB | ATCC BAA-916/DSM 44818/CNB- | SEWKDGEPLFLSCTVWRQAAEHVAESLQRGTRVIVSGRLRQRS | |
| | | | 440) | YETREGEKRTVIELEVDEIGPSERYATAKVQKMSRSGGGGFGG | |
| | | | | GGGQGGGGNFDDPWASAAPAPAPSRGGSGGGNFDEEPPF | |
| SSB_55 | SSB | Bacterial- | Stigmatella aurantiaca (strain | MAGGVNKVILIGNLGADPEVRFTPGGQAVANFRIATSDSWTDK | 289 |
| | | SSB | DW4/3-1) | NGQKQERTEWHRIVVWGKLAELCGEYLKKGRQCFVEGRLQT | |
| | | | | REWTDKENRKNYTTEVVASSVTFLGGRDAGEGSGMGSRRGG | |
| | | | | GASSRGGEPDYGAPPPGMDDGMNQGGSGDDDIPF | |
| SSB_56 | SSB | Viral- | Listeria welshimeri serovar 6b | MMNRVVLVGRLTKDPELRYTPAGVAVATFTLAVNRTFTNQQG | 290 |
| | | SSB | (strain ATCC 35897/DSM 20650/ | EREADFINCVVWRKPAENVANFLKKGSMAGVDGRVQTRNYE | |
| | | | SLCC5334), Listeria phage PSA | GNDGKRVYVTEIVAESVQFLEPRNSNGGGGNNYQGGNNNNY | |
| | | | | NNGGSNSGQAPTNNGGFGQDQQQSQNQNYQSTNNDPFASDG | |
| | | | | KPIDISDDDLPF | |
| SSB_57 | SSB | Bacterial- | Gramella forsetii (strain | MTGTLNKVMLIGHTGDDVKMHYFEGGGSIGRFPLATNESYTN | 291 |
| | | SSB | KT0803) | RTTGERVTNTEWHNVVVRNKAAEVCEKYLKKGDKVYIEGRIK | |
| | | | | TRKWQDDAGNEKYSTEVHCTEFTELTPKNESNAEPSGKSQASG | |
| | | | | NTSAKPKSDNFANKNEFYSQDEEEDDLPF | |
| SSB_58 | SSB | Viral- | Staphylococcus phage CNPH82 | MTNLTILTGRITKDLELKQAGQTQVTNFSMAVDNPFKKDDTSF | 292 |
| | | SSB | | EDIVAFGKTAQLLNDYCGKGSKVLIEGNEKQDRFQDKEGNNRS | |
| | | | | VVRVIANRIEFLDSKGSNQSNNQSPKRGQAPAGNNPFANGTDIE | |
| | | | | NSELPF | |
| SSB_59 | SSB | Viral- | Staphylococcus phage Pvl108 | MKITGQAQFTKETNQEKFYNGSAGFQAGEFTVKVKNIEFNDRE | 293 |
| | | SSB | | NRYFTIVFENDEGKQYKHNQFVPPYKYDFQEKQLIELVTRLGIK | |
| | | | | LNLPSLDFDTNDLIGKFCHLVLKWKFNKDEGKYFTDFSFIKPYK | |
| | | | | KGDDVVNKPIPKTDKQKAEENNGAQQQTSMSQQSNPFESSGQ | |
| | | | | EGYDDQDLAF | |
| SSB_60 | SSB | Viral- | Prochlorococcus phage P-SSP7 | MNHCVLEVEVIQAPTIRYTQDNQTPIAEMEVRFDALRVDTAPG | 294 |
| | | SSB | | QLKVVGWGNLAQDLQNRVQVGQRLVIEGRLRMNTVPRQDGT | |
| | | | | KEKRAEFTLAREHSLSGQAGQPASSPERPTSTTTNQTSRPIPIA | |
| | | | | ETPTPKPATTAEPEAASWNSAPLVPDTDDIPF | |
| SSB_61 | SSB | Bacterial- | Vibrio cholerae 1587 | MASRGVNKVILIGNLGQDPEVRYMPSGGAVANITIATSETWRD | 295 |
| | | SSB | | KATGEQKEKTEWHRVTLYGKLAEVAGEYLRKGSQVYIEGQLQ | |
| | | | | TRKWQDQSGQDRYSTEVVVQGYNGIMQMLGGRTQQGGMPA | |
| | | | | QGGMNAPAQQGSWGQPQQPAKQHQPMQQSAPQQYSQPQYNE | |
| | | | | PPMDFDDDIPF | |
| SSB_62 | SSB | Bacterial- | Bacteroides caccae ATCC 43185 | MSVNRVILIGNVGQDPRVKYFDTGSAVATFPLATTDRGYTLQN | 296 |
| | | SSB | | GTQIPERTEWHNIVASNRLAEIVDKYVHKGDKLYLEGKIRTRS | |
| | | | | YSDQSGAMRYITEIYVDNMEMLTPKGAGQGAGTSAQQGAATP | |
| | | | | SQQPQQMQQNQQPQQSQAQPVQDNPADDLPF | |
| SSB_63 | SSB | Bacterial- | Elusimicrobium minutum (strain | MASQIRLPEQNLVLLTGRLTRDANTAFTQKGAAVSRFDIAVNR | 297 |
| | | SSB | Pei191) | RYMDANGSWQDETTFVPVTLWGPAAERSKDRLKKGVPVHVE | |
| | | | | GRLVLNEYTDKNGVAHKNEQVNCRRIQILQSAFSESASGSGAS | |
| | | | | FNDTPVDNEAIDDDVPF | |
| SSB_64 | SSB | Bacterial- | Methylobacterium nodulans | MAGSVNKVILVGNLGRDPETRRETSGDPVVNLRLATSESWKD | 298 |
| | | SSB | (strain LMG 21967/CNCM I- | KATGERKEKTEWHSVVIYNENLARVAEQYLRKGSKVYVEGQL | |
| | | | 2342/ORS 2060) | QTRKWQDQSGVEKYTTEVVLQRFRGELTILDGRGGGETGAMD | |
| | | | | EMGGGQISRGGDFGGDRSSGGERRPAPAGGSQKRYDDLDDDIP | |
| | | | | F | |
| SSB_65 | SSB | Viral- | Yersinia phage YpsP-G, Yersinia | MAVNKIILLGNVGNYPEVNYTGSGTAVAKFSVATTEKWKDQS | 299 |
| | | SSB | phage phiA1122 | GEKKEKTNWHRCVVFGKRAEVVGEYVRKGSQLYIEGSMEYGS | |
| | | | | YDKDGVTMYTADVHVKDFQFIGGKREDGGNAGGGQSGGWG | |
| | | | | QPQQTQQQRQPASQPTNTATLKPEGQPKQRQMSQAERMLAQQ | |
| | | | | AAQAQQQSSEPPMDFDDDIPF | |
| SSB_66 | SSB | Bacterial- | Clostridium botulinum C str | MNRVVLVGRLTKDPELRFTPGAGKAVATFTLAVNRRFKSQGQ | 300 |
| | | SSB | Eklund | PDADFLPIVVWGKQAENTANYVGKGSQVGVSGAIHTRSYEAK | |
| | | | | DGTRRYVTEIVADEVQFLDSRNAVSRTEPRSTGMNEFDSSNND | |
| | | | | NDFNQSYDEEITPIDDGDIPF | |
| SSB_67 | SSB | Bacterial- | Ureaplasma urealyticum serovar | MNKVILIGNLVRDPEARQIPSGRLVTNFTVAVNDNIPNANANFI | 301 |
| | | SSB | 12 str ATCC 33696 | RCVAWNNQANFLTTYLKKGDAIAIEGRIVSRSYVDNNGKTNY | |
| | | | | VTEVYADQVQSLSRRNQNANDHNNDKVNVDTMMGAYASINT | |
| | | | | DAAFSSNQPQTNFQSTTSNSNKNDDEEDEITSWINLDDDLE | |
| SSB_68 | SSB | Bacterial- | Mycobacterium marinum (strain | MAGDTTITVVGNLTADPELRFTPSGAAVANFTVASTPRIYDRQS | 302 |
| | | SSB | ATCC BAA-535/M) | GEWKDGEALFLRCNIWREAAENVAESLTRGARVIVSGRLKQRS | |
| | | | | FETREGEKRTVVEVEVEEIGPSERYATAKVNKASRGGGGGGFG | |
| | | | | GGGGGGGGGGARQAPAQASSPAGGDDPWGSAPASGSFGGDD | |
| | | | | EPPF | |
| SSB_69 | SSB | Bacterial- | Oligotropha carboxidovorans | MAGSVNKVILVGNLGADPDVRRTQDGRPIVNESIATSDTWRDK | 303 |
| | | SSB | (strain ATCC 49405/DSM 1227/ | ATGERKEKTEWHRVVIFNEGLCRVAEQYLKKGAKVYIEGALQ | |
| | | | KCTC 32145/OM5) | TRKWQDKDGKDKYSTEVVLQGFNSTLTMLDGRSGGGGGSFA | |
| | | | | GDDAGSSFGSSGSSQRRSLPPSGGRDDMNDDIPF | |
| SSB_70 | SSB | Bacterial- | Clostridium botulinum (strain | MNKVVLIGRLTKDPELRFTPGAGTAVTTLTLAVDKYNSKSGQK | 304 |
| | | SSB | Eklund 17B/Type B) | EADFVPVVVWGKQAESTANYMSKGSQMAISGRIQTRNYEAKD | |
| | | | | GTKRYVTEVVATEVQFLSKSNASGNVGTNYGNNTEYSSSNNPF | |
| | | | | DGMNFEEDITPVDDGDMPF | |
| SSB_71 | SSB | Bacterial- | Collinsella stercoris DSM 13279 | MSINRVNISGNLTRDPELRATSSGTQVLSFGVAVNDRRRNPQT | 305 |
| | | SSB | | GDWEDYPNFVDCTMFGTRAEAVKRYLSKGSKVAIEGKLRYSS | |
| | | | | WERDGQRRSKLEVIVDEIEFMSRGQQGEGGGYAPAPSYGQQG | |
| | | | | GYAPAPAPQQAPAPMAAPVPPAVDVYDEDIPF | |
| SSB_72 | SSB | Bacterial- | Haemophilus parasuis serovar 5 | MAGVNKVIIVGNLGNDPDMRTMPNGDAVATLSVATSESWND | 306 |
| | | SSB | (strain SH0165) | KMTGERREVTEWHRIVFFRRQAEVAGQYLRKGSKVYVEGKLK | |
| | | | | TRKWQDQNGQDRYTTEIQGDVLQMLDSRSGDQGGGWNQTQT | |
| | | | | NYNQDGYTDSYAQNNNFNGGNATRPQPAQKPAAQAEPPMDN | |
| | | | | FDDDIPF | |
| SSB_73 | SSB | Bacterial- | Agrobacterium rhizogenes | MAGSVNKVILVGNEGADPEIRRTQDGRPIANLNIATSETWRDR | 307 |
| | | SSB | | NSGERKEKTEWHRVVIFNEGLCKVAEQYLKKGAKVYIEGALQ | |
| | | | | TRKWQDQNGQDKYSTEIVLQGFNSTLTMLDGRGEGGGGGNR | |
| | | | | GGGGGDFGGGDYGGDDYGQPAPSSGGGRSAGASRGAPASSGG | |
| | | | | GSNFSRDLDDDIPF | |
| SSB_74 | SSB | Viral- | Salmonella phage 553e | MASRGVNKVIILGRVGQDPEVRYSPSGTAFANLTVATSEQWRD | 308 |
| | | SSB | | KQTGEQKEQTEWHRVAVVGKLAEVVGQYVKKGDQVYFEGM | |
| | | | | LRTRKWQDQTGQDRYTTEINVGINGVMQMLGGTGDSKQQAA | |
| | | | | DRQSQKPQQQPSPTQHNEPPMDFDDDIPFAPVTLPFPRHAIHAI | |
| SSB_75 | SSB | Bacterial- | [Clostridium] methylpentosum | MLNKVILMGRLTADPEVRQTPNGISVLSFSIAVDRNYSKAEKK | 309 |
| | | SSB | DSM 5476 | TDFINLVAWRQTAEFIGRFFTKGQMIAVEGSIQTRNYEDKTGA | |
| | | | | KRTAFEVVVDQAHFTGGKSENPVRTTQPSYQQPPKFEEPAQNG | |
| | | | | ESFSVGDFNDFDGFEEIGTDDGDLPF | |
| SSB_76 | SSB | Bacterial- | Helicobacter pullorum MIT 98- | MFNKVILVGNLTRDVELRYLPSGAALARLNLATNRRYKKQDG | 310 |
| | | SSB | 5489 | TQAEEVCFIDVNLFGRTAEVANQYLKKGSQVLIEGRLVLESWT | |
| | | | | DNTGAKRTKHSITAESMQMLGQRQSTQEENHDYGAGDYNNY | |
| | | | | QEYEKPAYTASAAPKAQPVQKEPELPVIDINDDEIPF | |
| SSB_77 | SSB | Bacterial- | Persephonella marina (strain | MLNKVFLIGRLTRDPEIRELPSGSQVTSFSVAVNRSYRVNNEWK | 311 |
| | | SSB | DSM 14350/EX-H1) | EETYFFDVEAFGYLAERLGKQLNKGTQILIEGQLRQDRWETAG | |
| | | | | GDKRTKVKIVADKVSILSPKGEKAEKSEEEPELDIENSIEDFSS | |
| | | | | DEDVPF | |
| SSB_78 | SSB | Bacterial- | Brevibacillus brevis (strain 47/ | MNKVILIGNLTKDPELRYTPNGVAVATFTVAVNRPRTNQAGER | 312 |
| | | SSB | JCM 6285/ NBRC 100599) | ETDFINIVAWQKLADLCASYLRKGRQAAIEGRMQTRSYDNKE | |
| | | | | GKKVYVTEVVAENVQFLGGRGNESGGDNPGYDPGPGMGGGN | |
| | | | | KPSGQRNNDYDPFGDPFASAGKPINISDDDLPF | |
| SSB_79 | SSB | Bacterial- | Corynebacterium striatum ATCC | MAIDIITITGGLPRDAELRFTKSGKAVTSFTLANSDNKFDQEQN | 313 |
| | | SSB | 6940 | QWVKTRSMYLDVTIWDESTERKQNPVQWARLASELKQGDQV | |
| | | | | AVKGKLTTRTWETDGGEKRSKMEFLATSFYRMPTTQGAPNGQ | |
| | | | | QAQQNITQGLGAQAAGDPWNGAPQGGFSGADANPPF | |
| SSB_80 | SSB | Bacterial- | Cryptobacterium curtum (strain | MSSINRVFITGNLSRDPELRTTASGSAVLSFGVAVVDSVKNQQT | 314 |
| | | SSB | ATCC 700683/ DSM 15641/12- | GEWEDRPNWVECTLFGSRAQAISGYLHKGSKVAIDGRLHWSQ | |
| | | | 3) | WERNGEKRSKLEVIINDIQFLSPREGAQGAPQQPQYQQPAPTYQ | |
| | | | | QPAPTYQQTAQQPPQQPQTAPQYASASVYDEDIPF | |
| SSB_81 | SSB | Viral- | Listeria phage A500 | MRGGWFCMMNRVVLVGRLTKDPELRYTPSGVAVATFTLAVN | 315 |
| | | SSB | (Bacteriophage A500) | RTFTNQQGEREADFINCVVWRKPAENVANYLKKGSLAGVDGR | |
| | | | | VQTRNYEGQDGKRVYVTEIVAESVQFLEPRNNSGQHQDNNNN | |
| | | | | SYNQAPANNGFNQNQQQSQSYQTTNNDPFANDGKPIDISDDDL | |
| | | | | PF | |
| SSB_82 | SSB | Viral- | Lactobacillus prophage | MINNVVLVGRLTRDPDLRTTGSGISVATFTLAVDRQYTNSQGE | 316 |
| | | SSB | Lj928, Lactobacillus johnsonii | RGADFINCVIWRKAAENFANETSKGSEVGIQGRIQTRTYDDKD | |
| | | | (strain CNCM 1-12250/La1/ | GKRVYVTEVIVDNFSLLESRRDRENRQTNGGNFAPQGGNAPST | |
| | | | NCC 533) | NNFGGSSAPSMNNAPASGESNKPQDPFADSGSTIDISDDDLPF | |
| SSB_83 | SSB | Bacterial- | Vibrio cholerae (strain | MITEQNMASRGVNKVILIGNLGQDPEVRYMPSGGAVANITIAT | 317 |
| | | SSB | MO10), Vibrio | SETWRDKATGEQKEKTEWHRVTLYGKLAEVAGEYLRKGSQV | |
| | | | cholerae, Providencia | YIEGQLQTRKWQDQSGQDRYSTEVVVQGYNGIMQMLGGRAQ | |
| | | | alcalifaciens | QGGMPAQGGMNVPAQQGSWGQPQQPAKQHQPMQQSAPQQY | |
| | | | Ban1, Vibrio cholerae Ind4 | SQPQYNEPPMDFDDDIPF | |
| SSB_84 | SSB | Bacterial- | Fusobacterium mortiferum ATCC | MNVVVLVGRLTRDPELKFGQSGKAYSRFSLAVDRPFSKGEADF | 318 |
| | | SSB | 9817 | INCVAFGKTAELIGEYLRKGRKVGVNGRLQMNRFEMNGEKRT | |
| | | | | SYDVLVEAIEFLESKGSGDSMGGYEPEYSSPTPKSSAKEVEEI | |
| | | | | PYEDDDEFPF | |
| SSB_85 | SSB | Viral- | Burkholderia phage BcepNY3 | MASVNKVILVGNLGADPETRYLPSGDAISNIRLATTDRYKDKA | 319 |
| | | SSB | | SGEFEKEVTEWHRVAFFGRLAEIVDEHLRKGASVYIEGRIKTRK | |
| | | | | WQDQSGQDRYTTEIVADRMQMLGKPSGSRDDGGGERQQRAP | |
| | | | | QQQQQQRGQRNGYADATGRGQPQRDAQQRPPAGGGFDEMD | |
| | | | | DDIPF | |
| SSB_86 | SSB | Bacterial- | Agathobacter rectalis (strain | MNKVILMGRLTRDAEIRYAQGDNSLAIARFSLAVDRRYSKNAE | 320 |
| | | SSB | ATCC 33656/DSM 3377/JCM | EQSTDFINCVAFGKIAEFFERFGRKGTKFVVEGRIQTGSYTNKD | |
| | | | 17463/KCTC5835/VPI 0990) | GQKVYTTDVVVENAEFAESKSAASGNAGGFAPADRPAPSQAA | |
| | | | (Eubacterium rectale) | GDGFMNIPDGIDEELPFN | |
| SSB_87 | SSB | Viral- | Cyanophage PSS2 | MATINILGREGKDPEVKFFDSGNCVAKFTIGDVAGRKDDPTNW | 321 |
| | | SSB | | FDCEIWGKRAQLLGDTVSKGQRLMVSGDIKTETWTAKDGGNR | |
| | | | | SKQVVRVSDFQYIESRGEAAGGGQATSEEIPF | |
| SSB_88 | SSB | Bacterial- | Acinetobacter radioresistens | MRGVNKVILVGTLGRDPETKTFPNGGSLTQFSIATSESWTDKST | 322 |
| | | SSB | SK82 | GERKEQTEWHRIVLHNREGEIAQQYLRKGSKVYIEGSLRTRQW | |
| | | | | TDQNGQERYTTEIRGEQMQMLDSGRQQGDQAGAGFGGDQGY | |
| | | | | GQPRFNNNQGSQGGYGNGNQQGGGFNNNNNQGGGYGNNNP | |
| | | | | GGFAPKAPQSAPASQVPADLDDDLPF | |
| SSB_89 | SSB | Bacterial- | Enterococcus faecalis TX0027 | MINQVVLVGRETKDIDERYTASGSAVGSFTLAVNRNEKNQNG | 323 |
| | | SSB | | DREADFINCVIWRKPAETMANYARKGTLLGVVGRIQTRNYDN | |
| | | | | QQGQRVYVTEVICESFQLLEPKSANENSNSIQTSQNDGTSVQNN | |
| | | | | FEGNYATNQNKGENQQNNSQQMSFGGDVDPFAGAGNSIDISD | |
| | | | | DDLPF | |
| SSB_90 | SSB | Bacterial- | Klebsiella pneumoniae subsp | MKVISRGQVQQVPAKRQNRGPGNSTGDGFKRQNNGLRRFIMA | 324 |
| | | SSB | rhinoscleromatis ATCC 13884 | ARGVNKVILVGYLGQDPEVRYMPNGGAVANLTLATSETWRD | |
| | | | | KQTGEMRENTEWHRVVMFGKLAEVAGEYLRKGAQVYIEGQL | |
| | | | | RTRNWQDDAGVTRYVTEVLVGQNGTMQMLGGRRESGVPESA | |
| | | | | AQPQNPATPAQPAQAAAKSPKAKGGKKGRQDAAPSQQPPQPL | |
| | | | | PDDFPPMDDDAPF | |
| SSB_91 | SSB | Bacterial- | Haemophilus influenzae, | MRFFMAGINKVIIVGHLGNDPEIRTMPNGDAVANISVATSESW | 325 |
| | | SSB | Haemophilus influenzae NT127 | NDRNTGERREVTEWHRIVFYRRQAEICGEYERKGSQVYVEGRL | |
| | | | | KTRKWQDQNGQDRYTTEIQGDVMQMLGGRNQNAGYGNDMG | |
| | | | | GAPQPSYQARQTNNGGSYQSSRPAPQQSAPQAEPPMDGFDDDI | |
| | | | | PF | |
| SSB_92 | SSB | Bacterial- | Leptotrichia goodfellowii | MNQVLLIGRETKDPELKYSQSGKAFCRFSIAVTKEFNRNETDFF | 326 |
| | | SSB | F0264 | DCVAWNKTAEIIAEYMRKGKKIAIQGRLETGSYEKEGRNIKTY | |
| | | | | SIIVDKFEFVDSAGGQGQQQSSSYSQGTQPKETFADNDNDEIMD | |
| | | | | DDDFPF | |
| SSB_93 | SSB | Viral- | Lactobacillus phage phij11 | MINNVVLVGRLTRDPDLRTTGSGISVATFTLAVDRQYTNSQGE | 327 |
| | | SSB | | RGADFINCVIWRKAAENFANFTSKGSLVGIQGRIQTRTYDDKD | |
| | | | | GKRVYVTEVIVDNFSLLESRRDRENRQANGGNFAPQGGNAPST | |
| | | | | NNFGGSSAPSMNNAPASGESNKPQDPFADSGSTIDISDDDLPF | |
| SSB_94 | SSB | Bacterial- | Fusobacterium ulcerans 12-1B | MNLVVLTGRLTRDPELKFGQSGKAYSRFSLAVDRPFQKGEADF | 328 |
| | | SSB | | INCVAFGKTAELIGEYERKGRKVGVNGRLQMNRYEANGEKRT | |
| | | | | SYDVLVENIEFLEAKGSGDSAGYEPHDYAAAAPASAPKPSVKE | |
| | | | | AEDVPFDDDDEFPF | |
| SSB_95 | SSB | Bacterial- | Pediococcus acidilactici DSM | MINRAVLVGRLTRDPELRYTSSGAAVVSFTVAVNRQFTNSQGE | 329 |
| | | SSB | 20284 | READFINCVMWRKAAENFANFTRKGSLVGIDGRIQTRSYENQQ | |
| | | | | GQRVYVTEVVADNFSLLESRSASERRQENEGFNNGQSAPSQSS | |
| | | | | AGNPFDSGQANNNGAASQPNNSNPNDPFANGGQSIDISDDDLP | |
| | | | | F | |
| SSB_96 | SSB | Bacterial- | Desulfovibrio sp FW1012B | MAGSINKVILVGRLGQDPKLTYLASGSPVAEFSVATDESYKDR | 330 |
| | | SSB | | EGNKQEKTEWHRVKVFGRSAEFCNNYLTKGRLVYIEGTLRTRS | |
| | | | | WEDQQGQKRYTTEVVVTGPGHTVQGLDSRGQASEAPMGEEG | |
| | | | | GFQPRRAPQQGGGGGGQGGAPRGNYGGQGQSGGSRQQPYPD | |
| | | | | EDQGPAFPSEASGMDDVPF | |
| SSB_97 | SSB | Bacterial- | Hungatella hathewayi DSM 13479 | MNRVILMGRLTRDPEVRYSQGERAMAIARYTLAVDRRGRRNQ | 331 |
| | | SSB | | DGNEQTADFINCVAFDRAGEFAEKYFRQGMRVLISGRIQTGSY | |
| | | | | TNKDGIKVYTTDIIVDDQEFADSKGAASGEGGGYQPTSRPAPSS | |
| | | | | AIGDGFMNIPDGVEDEGLPFN | |
| SSB_98 | SSB | Bacterial- | Streptococcus gallolyticus | MINNVVLVGRMTRDAELRYTPSNQAVATFTLAVNRNFKNQNG | 332 |
| | | SSB | subsp gallolyticus TX20005 | EREADFINCVIWRQQAENLSNWAKKGTLIGVTGRIQTRNYENQ | |
| | | | | QGQRVYVTEIVADNFQILESRATREGQSGGSYNGGFNNNNSSF | |
| | | | | GGSSNDGGFSSQPSQSQTPNFGRDESPFGNSNPMDISDDDLPF | |
| SSB_99 | SSB | Bacterial- | Hydrogenobacter thermophilus | MLNKVLIIGRLTKDPSVRYLPSGNQITEFSIAYNRRYKVGDDW | 333 |
| | | SSB | (strain DSM 6534/IAM 12695/ | KEESHFFDVKAYGKLAESESTRISKGYTVVVEGRLTQDRWTDK | |
| | | | TK-6) | EGKAQSKVRIVADAVRIINKPKEDEAPEEEVIPDTYEQEAEEKL | |
| | | | | WNSQDDEIPF | |
| SSB_100 | SSB | Bacterial- | Ruminococcus sp SR1/5 | MNKVILMGRLTRDPEVRYSAGENALAIARYTLAVDRRFRRDG | 334 |
| | | SSB | | EASADFISCVSFGRTAEFAEKYFRQGLKIAVTGRIQTGSYTNRE | |
| | | | | GQKVYTTEVVVEDQEFAESKASSDSYAAAHPRTEAAPATSMPS | |
| | | | | PSAASADGFMNIPDGIDEELPFN | |
| SSB_101 | SSB | Bacterial- | Serratia odorifera DSM 4582 | MVLFGKLAEVAGEYLRKGSQVYIEGALQTRKWTDQAGVEKY | 335 |
| | | SSB | | TTEVVVNVGGTMQMLGGRQGGGAPAGGGQAAGGQGNWGQP | |
| | | | | QQPQGGNQFSGGQQSRPAQNSNAPAASSNEPPMDFDDDIPF | |
| SSB_102 | SSB | Bacterial- | Acinetobacter sp SH024 | MRGVNKVILVGTLGRDPETKTFPNGGSLTQFSIATSEAWTDKN | 336 |
| | | SSB | | TGERKEQTEWHRIVLHNRLGEIAQQFLRKGSKVYIEGSLRTRQ | |
| | | | | WTDQNGQERYTTEIRGDQMQMLDARQQGEQGFAGGNDFNQP | |
| | | | | RFNAPQQGGNGYQNNNNQGGGYGQNSGGYGSQGGFGNGGSN | |
| | | | | PQAGGFAPKAPQQPASAPADLDDDLPF | |
| SSB_103 | SSB | Viral- | Burkholderia phage BcepGomr | MASVNKVILVGNLGADPEVRYLPSGDAVANIRLATTDRYKDK | 337 |
| | | SSB | | ASGEMKEATEWHRVSFFGRLAEIVSEYLKKGSSVYLEGRIRTR | |
| | | | | KWQAQDGTDRYSTEIVAEQMQMLGGRGGSMGGGGDEGGYS | |
| | | | | RGEPSERSGGGGGGRAASGGGSRGGSGGGAGGGASRPSAPAG | |
| | | | | GGFDEMDDDIPF | |
| SSB_104 | SSB | Viral- | Burkholderia phage BcepC6B | MASVNKVILVGNLGADPEVRYLPSGDAVANIRVATTDRYKDK | 338 |
| | | SSB | | ESGELKEVTEWHRVSFFGRLAEIVSEYLKKGSSVYIEGRLRTRK | |
| | | | | WQQDGVDRYSTEIVADQMQMLGGNGKGRTGEGEGDSESGAA | |
| | | | | PETAAGAPAEGSSSKTRSRRAAPQRRASATAGNEMDDDEPFA | |
| SSB_105 | SSB | Bacterial- | Komagataeibacter oboediens | MAGSVNKVILVGNEGKDPEIRNSQNGAKIVSLTLATSETWNDR | 339 |
| | | SSB | | ASGERRERTEWHRVVIFNERIGDVAERFLRKGRKVYLEGTLQT | |
| | | | | RKWTDQSGMERYTTEVVIDRFRGELVELDSNRGGEGGEGGGY | |
| | | | | GGGPGGGGGYGGGAPRPAQAPRSTPPAGGGGGWDAPSGGSDL | |
| | | | | DDEIPF | |
| SSB_106 | SSB | BacterialV | Peptoniphilus duerdenii ATCC | MNVVTLIGRLTRDPELRYSPSGMANVRITVAVDRGYNQQKRQ | 340 |
| | | SSB | BAA-1640 | EAESQNQPTADFISCVAFGKTAELIANYFNKGNRIGLEGRIQTG | |
| | | | | SYDKPDGTRVYTTDVVVNRVHFIESRSESQTYQRRPQEGAGGF | |
| | | | | SAPSQNPGGFNKPPVNSSYDQFSTSEDEGEAFFPVDNEDIPF | |
| SSB_107 | SSB | Bacterial- | Paenibacillus curdlanolyticus | MLNRVILIGRLTRDPELRYTPAGVAVTQFTLAVDRPFTSGGGER | 341 |
| | | SSB | YK9 | EADEIPVVTWRQLAETCANYLRKGRLAAVEGRIQVRNYENNE | |
| | | | | GKRVYVTEVIADNVRFLESNREGGAPREEGSYGGGNSGGGFG | |
| | | | | GGSNAGGGSYGGNSGGGSRSGQNQRNDNRDPFSDDGRPIDISE | |
| | | | | DDLPF | |
| SSB_108 | SSB | Bacterial- | Ahrensia sp R2A130 | MAGSVNKVILVGNLGRDPEIRRTQDGKAIANFSIATSETWRDR | 342 |
| | | SSB | | NSGERREKTEWHRIACFNEGLNKVIEQYVKKGSKVYIEGQLQT | |
| | | | | RKWTDNAGVEKYTTEIVLQNFTGVLTMLDSRNSGGDGGGDSF | |
| | | | | GGGGGGGQIGGSGGGNYGGGGSGGGNQGGGFPSGGDMDDDI | |
| | | | | PF | |
| SSB_109 | SSB | Bacterial- | Parasutterella | MASVNKVIILGNLGRDPETRFSGNNLQITSMSVATTSYRRSAET | 343 |
| | | SSB | excrementihominis | QERVEETEWHRVVLFGRQAEIAQQYLKKGSRVYLEGRLRTRK | |
| | | | CAG:233 | WEKDGQTHYSTEILADTLQLIDRKSDVVGGGQSVAPQSSGDGF | |
| | | | | ESPAAPRRSEFTSGAPAARPAAPAQPAAPVPSAAPTDDFEADEI | |
| | | | | PF | |
| SSB_110 | SSB | Viral- | Mycobacterium phage | MASVDIQQVGNLTADPELRFLPSGVAVAQFSVASTPRVKKGDE | 344 |
| | | SSB | Troll4, Mycobacterium phage | WVDGETVFLRCTVWRELAEGAAETLRKGDQVVVLGKLKQRS | |
| | | | Gumball, Mycobacterium phage | FETKEGEKRTVFEVDGEFVGKSVRARKSRDGGYSAAATEEPPF | |
| | | | Nova, Mycobacterium phage | | |
| | | | SirHarley, Mycobacterium phage | | |
| | | | Adjutor, Mycobacterium phage | | |
| | | | Butterscotch, Mycobacterium | | |
| | | | phage PLot, Mycobacterium | | |
| | | | phage PBI1 | | |
| SSB_111 | SSB | Bacterial- | Paenibacillus polymyxa (strain | MLNRVILIGRLTKDPELRYTPSGVAVTQFTLAVDRPFTSQGGER | 345 |
| | | SSB | E681) | EADFLPIVTWRQLAETCANYLRKGRLTAVEGRVQVRNYENNE | |
| | | | | GKRVYVTEIVADNVRFLESNRDGGNGGGNSGGAAREESPFGG | |
| | | | | GNSNSGRGNNNSRNNQDPFSDDGKPIDISDDDLPF | |
| SSB_112 | SSB | Bacterial- | Neisseria lactamica Y92-1009 | MSLNKVILIGRLGRDPEVRYMPNGEAVCNFSVATSETWNDRN | 346 |
| | | SSB | | GQRVERTEWHNITMYRKLAEIAGQYLKKGGLVYLEGRIQSRK | |
| | | | | YQGKDGIERTAYDIVANEMKMLGGRNENSGGAPYEEGYGQSQ | |
| | | | | EAYQRPAQQNRQPAPDAPSHPQEAPAAPRRQPVPAAAPVEDID | |
| | | | | DDIPF | |
| SSB_113 | SSB | Bacterial- | Hafnia alvei ATCC 51873 | MASRGVNKVILVGNLGQDPEVRYMPNGGAVANITLATSETWR | 347 |
| | | SSB | | DKQTGEQKEKTEWHRVVLFGKLAEVAGEYLRKGSQVYIEGAL | |
| | | | | QTRKWTDQAGVEKYTTEIVVNVGGTMQMLGGRQGGGAPMG | |
| | | | | GGQAQGQQGGWGQPQQPQGNQFSGGSQPAARPQSAPAAQPQ | |
| | | | | SNEPPMDFDDDIPF | |
| SSB_114 | SSB | Bacterial- | Thermaerobacter marianensis | MLNVVVLIGRLVRDPELRYTPSGVAVGGFTLAVDRPFTNQQGE | 348 |
| | | SSB | (strain ATCC 700841/DSM | READFIDIVVWRKLAETCANHLSKGRLVAVRGRLQVRSYETQ | |
| | | | 12885/JCM10246/7p75a) | DGQRRRVAEVVADDVRFLDRGPGADRGAAPGSPAGDELADFG | |
| | | | | DVTGLPDDDIPF | |
| SSB_115 | SSB | Bacterial- | Bacillus sp 2_A_57_CT2 | MMNRVVLVGRLTKDPDLRYTPNGVPVASFTLAVNRTFTNQQG | 349 |
| | | SSB | | EREADFINCVVWRKPAENVANFLKKGSLAGVDGRIQSRSYEGQ | |
| | | | | DGKRVYVTEVQAESVQFLEPKNSSGGQGGNPNYGGPRDQDFP | |
| | | | | FGNNSNQNQRQDNRNQGGYTRVDQDPFANDGQIDISDDDLPF | |
| SSB_116 | SSB | Bacterial- | Bartonella schoenbuchensis | MAGSLNKVILIGNLGADPEIRRLNSGDQVANLRIATSESWRDR | 350 |
| | | SSB | (strain DSM 13525/NCTC | NTNERKERTEWHSIVIFNENLVKIAEQYLKKGNKIYIEGQLQTR | |
| | | | 13165/R1) | KWQDQNGNDRYTTEIVLQKYRGELQMLEGRGAMDGGERMQ | |
| | | | | DTSPLGGGDFGDSSFDRKEDFSQNSNYLEGNFSHQLDDDVPF | |
| SSB_117 | SSB | Viral- | Streptococcus phage | MINNVTLVGRLVAPPDLRKTPNNVSSLQGTLAVNRNFKNENGE | 351 |
| | | SSB | V22, Streptococcus pneumoniae | READFINFQAWRGTADVIAQVCSKGSLIGLTGRLQVRSYEKDG | |
| | | | | QRRYVTEVIAESVALLESRNSQHGQGNSFQNGNSSPFTDPNPFD | |
| | | | | LPNDGLPF | |
| SSB_118 | SSB | Bacterial- | Anaerococcus hydrogenalis ACS- | MNKVFLIGRLTKDPDLRYTQQGQAVVSFSLAVDRGLSKQKRQ | 352 |
| | | SSB | 025-V-Sch4 | EMESMNRPTADFPRITVWGVQAENVSRYLKKGNQCAIDGRIQT | |
| | | | | GSYQDKDGKMVYTTDVVADRVEFLESRSEGQYQNNNNPMNQ | |
| | | | | DNGFGDMNQDRSYNNSNNFQQNNNQNMNSNNDDFFDDDFTE | |
| | | | | IEDDGRIPF | |
| SSB_119 | SSB | Bacterial- | Capnocytophaga sp oral taxon | MNIVGRLTENAQVQTLSNGKQVVNFSVAVNDNYRNKAGENV | 353 |
| | | SSB | 338 str F0234 | QQTSFFDCAYWLSTGVAPYLTKGTLVELEGRVSARAWLNREG | |
| | | | | EPQAGLNFHTSKIKFHFSKKAEVTPNTSASEANNANAITPLPKP | |
| | | | | QVTTGQVAEEDEDDLPF | |
| SSB_120 | SSB | Viral- | Enterobacteria phage | MASKGVNKVILVGNLGQDPEVRYMPNGGAVANLSLATSDTW | 354 |
| | | SSB | HK629, Salmonella phage HK620 | TDKQTGDKKERTEWHRVVLYGKLAEIASEYLRKGSQVYIEGA | |
| | | | (Bacteriophage HK620) | LRTRKWTDQSGVEKYTTEVVVSQSGTMQMLGGRSNAGNGQQ | |
| | | | | QGGWGQPQQPAAPSHSGTPPQQHPASEPPMDFDDDIPFAPFGH | |
| | | | | SVSRHALYALS | |
| SSB_121 | SSB | Bacterial- | Methyloversatilis universalis | MASVNKVIIVGNLGRDPETRYAPNGDAICNITVATTDSWKDKQ | 355 |
| | | SSB | (strain ATCC BAA-1314/JCM | TGERKEQTEWHRVSFYGRLAEIAGQYLRKGSPVYVEGSLRTRK | |
| | | | 13912/FAM5) | WQDKEGQDRYTTEIRAEQMQMLGSRQGAGGEGGGSGGGYGG | |
| | | | | GGGGYGGGDDFDQAPPQRQSAPRQAPSRPQSAPSAPPASSGGG | |
| | | | | FGGMDDDIPF | |
| SSB_122 | SSB | Bacterial- | Streptococcus infantis SK970 | MINNVVLVGRMVRDAELRYTPSNVAVATFTLAVNRTFKSQNG | 356 |
| | | SSB | | EREADFINVVMWRQQAENLANWAKKGSLIGVTGRIQTRSYDN | |
| | | | | QQGQRVYVTEVVAENFQMLESRSVREGQTGGAHSAPSSNYSA | |
| | | | | PTQSVPDFSRDENPFGTTNPLDISDDDLPF | |
| SSB_123 | SSB | Viral- | Listonella phage phiHSIC | MASRGVNKVILVGNLGNDPEIRYMPGGAAVANITIATSDSWRD | 357 |
| | | SSB | | KATGEQREKTEWHRVALFGKLAEVAGEYLRKGSQVYIEGQLQ | |
| | | | | TRKWQDQSGQDRYTTEVVVQGFNGVMQMLGGRAQGGAPAQ | |
| | | | | GGMPQQQQQGGGWGQPQQPAMQKQPQQQQSAPQQAQPQYN | |
| | | | | EPPMDFDDDIPF | |
| SSB_124 | SSB | Bacterial- | Lactobacillus ruminis SPM0211 | MINRVVLVGRLTRDPDLRYTNSGTSVASFTVAVDRNFTNQQG | 358 |
| | | SSB | | NREADFINCVVWGKSAENFANFTHKGSLVGIEGRIQTRSYENQ | |
| | | | | QGNRVYVTEVVTENFSLLESKAESDRYRAQHGGSASSAPRQQS | |
| | | | | QSSFVGNPYGAPANNQGSYQQDNGYGNVNNDAMQDPFAGNG | |
| | | | | SKTDVSEDDLPF | |
| SSB_125 | SSB | Bacterial- | Paenibacillus mucilaginosus | MLNRVILIGRLTRDPELRYTPAGVAVTQFTLAVDRPFSSNQGQR | 359 |
| | | SSB | 3016 | EADFIPVVTWRQLAETCANYLRKGRLAAVEGRIQVRNYDNNE | |
| | | | | GRRVYVTEVIADNVRFLESPNSGNREDGSGMGGSSGGGSSSGG | |
| | | | | GNRGSYGGGREQQDPFQDDGRPIDISDDDLPF | |
| SSB_126 | SSB | Bacterial- | Simkania negevensis (strain | MNQLTIMGHLGADPEVRFTSSGQKVTTLRVAENQKRGGKDET | 360 |
| | | SSB | ATCC VR-1471/Z) | LWWRITIWGDQFDKLVSYLKKGSAIIVTGEMSKPEIYNDRDGK | |
| | | | | PQISLNMTAYHIAFSPFGRTEKQPQEEPAMAGQSSGMSGFGGD | |
| | | | | QGQQHHYHKGGYDQSHMSQGQGPTSYNEPSDDEIPF | |
| SSB_127 | SSB | Bacterial- | Sporosarcina newyorkensis 2681 | MINRVVLVGRLTKDPELKYTQSGIAVTRFTLAVNRAFSNQQGE | 361 |
| | | SSB | | READFINCVAWRKQAENIANYLRKGSLAGVDGRIQTGSFEGQD | |
| | | | | GKRVYTTEVVADSTQFLEPRSANQERPQTPSYGGAPSYNNAPS | |
| | | | | QDQGYNQQSYQPNQQNMTRVDNDPFQPGGGPIEVTDDDLPF | |
| SSB_128 | SSB | Bacterial- | Lactobacillus reuteri | MLNRAVLTGRLTRDPELRYTTSGTAVVSFTLAVDRQFRNQNG | 362 |
| | | SSB | | DRDADFINCVIWRKSAENFSNFTHKGSLVGIEGRIQTRNYENQQ | |
| | | | | GNRVYVTEVVVDNFALLEPRQNGGMNQSGMQQPFNNNQQSF | |
| | | | | GAQAPQYGSQPQPGNNAPQSNPSPSMDNGFDPNQNAGNQFPG | |
| | | | | SSDDGGQSIDLADDELPF | |
| SSB_129 | SSB | Bacterial- | Bacillus subtilis subsp | MLNRVVLVGRLTKDPELRYTPNGAAVATFTLAVNRTFTNQSG | 363 |
| | | SSB | spizizenii (strain TU-B-10), | EREADFINCVTWRRQAENVANFLKKGSLAGVDGRLQTRNYEN | |
| | | | Jeotgalibacillus marinus | QQGQRVFVTEVQAESVQFLEPKNGGGSGSGGYNEGNSGGGQY | |
| | | | | FGGGQNDNPFGGNQNNQKRNQGNSFNDDPFANDGKPIDISDD | |
| | | | | DLPF | |
| SSB_130 | SSB | Bacterial- | Thiorhodovibrio sp 970 | MASRGVNKVILIGNLGNDPEIRYFPNGDAVTNLSIATSESWKDR | 364 |
| | | SSB | | NTGEPQERTEWHRIVIRGKLAEIAKQYLRKGSKVFIEGKLRTRK | |
| | | | | WQGQDGQDRYTTEVIVDMTGSMQMLDSRPSGGDYGADNSGG | |
| | | | | SWTSDPAPGIGTAAATTYAQAPYPDQQSPQQQAPAPQNSGQYP | |
| | | | | SQYPNQQPAQSPAPPPDQSGPGLDEPFDDDIPF | |
| SSB_131 | SSB | Bacterial- | Paenibacillus lactis 154 | MLNRVILIGRLTRDPELRYTPSGVAVTQFTLAVDRPFTGQGGER | 365 |
| | | SSB | | EADFIPVVTWRQLAETCANYLRKGRLTAVEGRIQVRNYENNE | |
| | | | | GKRVYVTEVIADNVRFLESNREGGGGGNREESSFGGGSGSGNR | |
| | | | | GGNNFSRNNQDPFSDEGKPIDISDDDLPF | |
| SSB_132 | SSB | Viral- | Streptococcus phage M102 | MINNVVLVGRTTKEIELKYTSNNLAYANFTLAVNRNFKNQNG | 366 |
| | | SSB | | EREADFINIVIWRQQAENLANWAKKGTLLGITGRIQTRNYENQ | |
| | | | | QGQRVYVTEVVADNFQILERREVQANTQKPAQQEAFSDVDDI | |
| | | | | DLPF | |
| SSB_133 | SSB | Bacterial- | Commensalibacter intestini A911 | MAGSVNKVILVGNLGKDPDVRTTQMGTKVVNLTLATSDTWN | 367 |
| | | SSB | | DRQTGERKENTEWHRVVIFNERLADVAEKYLRKGRKVFIEGQ | |
| | | | | LKTRKWTDQQGMERYTTEVVVDRFRGELVLLDSNRSGGDDM | |
| | | | | GYGDDYGASAPMAPASRPAMSAPSAPSKSAGGGWDSSMPGH | |
| | | | | NDLDDEIPF | |
| SSB_134 | SSB | Bacterial- | Desulfitobacterium | MLNRVVLIGRLTKDPELRYTPSGVAVATFTLAVDRNEKNSNGE | 368 |
| | | SSB | metallireducens DSM 15288 | RDTDFIPCVVYRQLAELCANFLSKGRLASVDGRLQVRSFEGQD | |
| | | | | GQRRWVTEVIAENVQFLSPKENGNSGNGTSGNASNVGTYGHE | |
| | | | | VSLDDDIPF | |
| SSB_135 | SSB | Bacterial- | Paenibacillus terrae (strain | MLNRVILIGRLTKDPELRYTPSGVAVTQFTLAVDRPFTSQGGER | 369 |
| | | SSB | HPL-003) | EADFLPIVTWRQLAETCANYLRKGRLTAVEGRVQVRNYENNE | |
| | | | | GKRVYVTEIVADNVRFLESNRDGGNGGGNSGGAAREESPFGG | |
| | | | | GNSNSGRGNNNSRNNHDPFSDDGKPIDISDDDLPF | |
| SSB_136 | SSB | Bacterial- | Bradyrhizobium sp STM 3843 | MAGSVNKVILVGNLGKDPEIRRTQDGRPIANLSIATSETWRDK | 370 |
| | | SSB | | ATGERKEKTEWHRVVIFNEGLCKVAEQYEKKGAKVYIEGALQ | |
| | | | | TRKWTDQSGVEKYSTEVVLQGFNSTLTMLDGRGGGGGSFADE | |
| | | | | PGGDFGSSGPSMAPPRRAVASAGGGRNSDMDDDIPF | |
| SSB_137 | SSB | Bacterial- | Frateuria aurantia (strain ATCC | MARGINKVILVGNLGGDPEERYTGGGTAVCQLRVATAETWND | 371 |
| | | SSB | 33424/DSM 6220/NBRC 3245/ | KQSGQRQERTEWHRVVLFGKEGEIAQEYLRKGRQVYIEGSLRT | |
| | | | NCIMB13370) (Acetobacter | KEYTDKEGIKRFTTEVIATDMQMLSGDGGSSGNRQQPGNSRGR | |
| | | | aurantius) | GQQANQRGHAQQHEPPPDQGAPPFDDDDIPF | |
| SSB_138 | SSB | Bacterial- | Bacillus sp 1NLA3E | MMNRVVLVGRLTKDPDLRYTPNGVAVATFTLAVNRSFSNQQG | 372 |
| | | SSB | | EREADFINCVVWRRPAENVANFLKKGSLAGVDGHIQTRHYEG | |
| | | | | QDGKRVYVTEVVAESVQFLEPKSSASGDRGGSGTYNEPREQQ | |
| | | | | GSPFGNSNNNQNQNQRQNNNNKGYTRVDEDPFAGDGQIDISD | |
| | | | | DDLPF | |
| SSB_139 | SSB | Bacterial- | Paenibacillus dendritiformis | MLNRVILIGRLTRDPELRYTPSGVAVTQFTLAVDRPFSNQSGER | 373 |
| | | SSB | C454 | EADFIPVVTWRQLAETCANYLRKGRLTAVEGRIQVRNYDNNE | |
| | | | | GKRVYVTEVIADNVRFLESNRDSGGSRDDMGGGYGGGQPNN | |
| | | | | NSRPYGGGGSNQSRGPAADPFSDDGRPIDISDDDLPF | |
| SSB_140 | SSB | Bacterial- | gamma proteobacterium BDW918 | MARGINKVILVGNLGQDPETRYMPSGGAVTNVTIATSETWKD | 374 |
| | | SSB | | KQSGQPQERTEWHRVVFFNRLAEIAGEYLKKGSKVYVEGSLRT | |
| | | | | RKWQNKEGVDQYTTEIVAAEMQMLDGRGGAGGGASGGASN | |
| | | | | YDDGGYGQQQAPQAQAAAPAPRRAPPPQQNRAPAAPAQNPPA | |
| | | | | GFDDFDDDIPF | |
| SSB_141 | SSB | Bacterial- | Haemophilus | MAGVNKVIIVGNLGNDPEMRTMPNGEAVANISVATSESWTDK | 375 |
| | | SSB | paraphrohaemolyticus HK411 | NTGERREATEWHRIVFYRRQAEVAGQYLRKGSQVYVEGRLKT | |
| | | | | RKWQDQNGQDRYTTEIQGDVLQMLGSRNQGGEMGGQGGWS | |
| | | | | QSNNQGGNWNQAPASNNYNQGNSYNNNYSQTASKPVAKPAQ | |
| | | | | AEPPMDNFDDDIPF | |
| SSB_142 | SSB | Viral- | Xanthomonas phage OP2 | MASRGVNKVILVGNLGNDPEIRYMPNGGAVANITVATSESWN | 376 |
| | | SSB | | DKQTGEKKEVTEWHRVVLFGKVAEIAGEYLKKGSQVYIEGQL | |
| | | | | KTRKWEKDGVERYTTEIVVNVGGTMQMIGKAPEGGSGGGNRS | |
| | | | | ASNTGWGQPQQPQHSGTPNNKPQNRPSANHQGAAQNGEPPM | |
| | | | | NFDDDIPF | |
| SSB_143 | SSB | Bacterial- | Nitrolancea hollandica Lb | MARRDLNKIQIIGNLGRDPEMRYTPGGTPVTEFSVAVNRPPRR | 377 |
| | | SSB | | GQDGQATEETDWFRVVCWDKLAEITDQYLKKGSRVYIEGRLQ | |
| | | | | IRKYTGNDGVDRTSVEIIARDMLMLSGREEGGYAGREEGGTRR | |
| | | | | EPASSRSGDSGEEDFDDLPF | |
| SSB_144 | SSB | Bacterial- | Herbaspirillum sp YR522 | MASVNKVIIVGNLGRDPETRYMPNGEAVTNIAVATTESWKDK | 378 |
| | | SSB | | NSGEKKELTEWHRITFYRKLAEIAGQYLKKGSQIYVEGRLQTR | |
| | | | | KWTDKDGGERYTTEIIADTMQMLGSRQGGGGGGGSMDDGGS | |
| | | | | YGGGGGGYGGGAPRQAGGGAGGGGGASAPRQQPARQPASNN | |
| | | | | FQDMDDDIPF | |
| SSB_145 | SSB | Bacterial- | Rhizobium sp CF080 | MAGSVNKVILVGNVGADPEIRRTQDGRPIANLRIATSETWRDR | 379 |
| | | SSB | | NNGERREKTEWHTVVVFNEGLCKVVEQYVKKGAKLYIEGAL | |
| | | | | QTRKWQDQTGNDRYSTEIVLQGFNSTLTMLDGRGEGGGDRGG | |
| | | | | AGGNRVGNDFGGNDFGGGDDYERRPAAGGASRGGQSSGGQP | |
| | | | | AGGNFSRDLDDDIPF | |
| SSB_146 | SSB | Bacterial- | Paenibacillus alvei DSM 29 | MLNRVILIGRLTRDPELRYTSSGVAVTQFTLAVDRPFSSQGGER | 380 |
| | | SSB | | EADFIPVVTWRQLAETCANYLRKGRLTAVEGRIQVRNYDNNE | |
| | | | | GKRVYVTEIIADNVRFLESNRDNGGTRDDMGSNYGAPAPQYN | |
| | | | | APARGGNSNSRGQAAADPFSDDGRPIDISDDDLPF | |
| SSB_147 | SSB | Viral- | Lactobacillus phage | MINRVVLAGRPTRNLELKSIKSGNSVCSFTLAVDRNFKSKSGER | 381 |
| | | SSB | KC5a, Lactobacillus phage | EADFINCVAWGKTAEVMSQYVKKGSAIGVDGRIQTRSYDNRD | |
| | | | phi jlb1 | GQRVYVTEVVVENFSFLSDPPKNSQVSKNNQSLNQSNDPFDSN | |
| | | | | GQVDIADDDLPF | |
| SSB_148 | SSB | Bacterial- | Gordonia soli NBRC 108243 | MAGDTVITVIGNLTADPELRFTPSGAAVANFTVASTPRTFDRQT | 382 |
| | | SSB | | NEWKDGEALFLRCNIWRDAAENVTESLTKGSRVIVQGRLKQR | |
| | | | | SFETREGEKRTVVELEVDEIGPSLRYATAKVNKASRGGGGGGG | |
| | | | | FGSSGGGSRGGGSNQQVADDPWGSAPASSGSFGGGDDEPPF | |
| SSB_149 | SSB | Bacterial- | Streptomyces rimosus | MSFGETPVTIIGNLTADPELKYTTGGQALARFTVASTPRTFDRE | 383 |
| | | SSB | | ANQWKDGTSTFFRCATWRALAEHVAESLTKGSRVVLSGRIRQ | |
| | | | | HNWQTEQGENRSMLAVEVDEIGASLRFTTVTIEGKRTNGTAPA | |
| | | | | DDPWNTAGNPAKTDEEPPF | |
| SSB_150 | SSB | Bacterial- | Paeniclostridium sordellii | MNHVVLVGRLTKDPELRYIPGTGTAVATFTIAIDRDYAKKDGS | 384 |
| | | SSB | (Clostridium sordellii) | RETDFIPVEVMGKSAEFCANYISKGREVALQGSIRVDNYQNQS | |
| | | | | GERRTFTKVSARNIQALDSNKNRSDSPYPSQNQSFEPSFEPSFEP | |
| | | | | TGLDPQGFQAIDDDDIPF | |
| SSB_151 | SSB | Viral- | Pseudomonas | MATPVFWEGNIGSAPEHRSFPNGNNPPRQLLRLNVMFDNSIPD | 385 |
| | | SSB | aeruginosa , Pseudomonas | GQGGYKDRGGFWCSVEWWHQDAQRFAELFAKGMRVKVEGR | |
| | | | aeruginosa DHS01, Pseudomonas | AIMDRWPDKESGEEVQALKVEASRISILPHRLAEVTLLPSTNGQ | |
| | | | phage LKA5, Pseudomonas phage | ATQHQQTRQVSQQDYDSAFDDDIPM | |
| | | | F116 | | |
| SSB_152 | SSB- | Bacterial- | Lactobacillus rossiae DSM | MINRAVLTGRLTRDPEVRYTQSGAAVGSFTLAVDRQFTNQQG | 386 |
| | | SSB | 15814 | QREADFINCVIWRKSAENFANFTHKGSLVGIEGRIQTRNYENQQ | |
| | | | | GQRVYVTEVVVENFALLESRSQSDQRTSGNTNDNGGYNNNAP | |
| | | | | QSGSANPFGGTGNNGGNNAGNTAPSSQSSQTPADPFAGNGESI | |
| | | | | DISDDDLPF | |
| SSB_153 | SSB | Bacterial- | Nocardia terpenica | MFGAITPTVIGNLTADPELFFSKKGEAGVHFTVACNDRYYDKD | 387 |
| | | SSB | | AERYKDLPAVFMRCTAWGALAEHISDSLSRGMTVIAYGRLKQ | |
| | | | | SSYTVKDTGEKRTVMEMTIDVLGPSLQYATAVVTKASRAATVI | |
| | | | | GEPIDDPWGDAAEQTPVSVGAGEQSSPEGDDDKPPF | |
| SSB_154 | SSB | Bacterial- | Spiroplasma kunkelii CR2-3x | MNQFTAIGRTTKDIEIKKTNNGKEYAIFQLAVARPHSNKKETDF | 388 |
| | | SSB | | IPCQVWNKQASVLQQYCQKGSQIAIKGILQSFKDKDNKIHWMV | |
| | | | | RVYSYEFLQTKNNLNNDTYNDIQSITPNITDQTQLIPRNIRLEEV | |
| | | | | ETKELFENQDDTILWD | |
| SSB_155 | SSB | Bacterial- | Enterococcus faecalis (strain | MINNLTLVGRLTKDVDLRYTKSGTAVGQFILAVNRNFTNQNG | 389 |
| | | SSB | ATCC 700802/V583) | DREADFINCVIWRKAAESLANYARKGTLIGLTGRIQTRNYENQ | |
| | | | | QGQRVYVTEVVIENFQLLESKEVNEQRRGQSTGAGQATFDKQP | |
| | | | | TDKPDPLDPFEQGNSPIEISDDDLPF | |
| SSB_156 | SSB | Viral- | Mycobacterium phage Hamulus, | MALTLPVVTIEGTLTADPTLNFTQGGTAVSNITIACNTRRKNPQ | 390 |
| | | SSB | Mycobacterium phage Dante, | TDQWEDGDTTFMRGTIWKQLAENVSDSLRKGDRVLAHGVLK | |
| | | | Mycobacterium phage Ardmore, | QKDYEKDGVKRTAYELDIEGIGPSLRFATASVTKSSGGSGGGA | |
| | | | Mycobacterium phage Llij, | RQQPKEDPWGGSSDDWGGDF | |
| | | | Mycobacterium phage Drago, | | |
| | | | Mycobacterium phage Phatniss, | | |
| | | | Mycobacterium phage Spartacus, | | |
| | | | Mycobacterium phage Boomer, | | |
| | | | Mycobacterium phage SiSi, | | |
| | | | Mycobacterium phage PMC, | | |
| | | | Mycobacterium phage Ovechkin, | | |
| | | | Mycobacterium phage Ramsey, | | |
| | | | Mycobacterium phage Fruitloop, | | |
| | | | Mycobacterium phage SG4 | | |
| SSB_157 | SSB | Bacterial- | Dialister sp CAG:486 | MNSVQVMGNLARDPVVRATKTGRAMASFTVAVNRSFTTPQG | 391 |
| | | SSB | | EQREITDWINVVAWGNLAEAVGNQLKKGSRVFVEGRFTTRSY | |
| | | | | DTPDGQRRWVSEVTANFVALPIGGFSHSQQQPSGNAFGGNNG | |
| | | | | YTGNNGYGGNNGGFNNGASPFGQSQPQGQPKSSFGQFGQASK | |
| | | | | DEDIPF | |
| SSB_158 | SSB | Bacterial- | Faecalibacterium sp CAG:82 | MLNVVAIMGRLVADPELRTTQSGINVVSFRIACDRNFARQGEQ | 392 |
| | | SSB | | RQADFIDIVAWRQQAEFVSKYFQKGSLIAIEGSLQTRQYQDKN | |
| | | | | GNNRTAVEVVANNISFAGPKSNNQGGGSYQNAAPSYQNQAPA | |
| | | | | RPAAVEAAPSYSSGSADDFAVIDDSDDLPF | |
| SSB_159 | SSB | Bacterial- | Clostridium sp CAG:470 | MNKVILMGRLTRDPEVRYTQTNNTLVASFSLAVNRRFARQGE | 393 |
| | | SSB | | ERQADFINIVAWSKLGEFCSKYFKKGQQVGIIGRIQTRTWDDD | |
| | | | | QGVKHYVTEVVAEEAYFADSKREGDMGAGTFENTFGNTMPG | |
| | | | | SMGSDFETSSTDDLPF | |
| SSB_160 | SSB | Bacterial- | Prevotella sp CAG:873 | MNKVMLIGNVGKDPDVKYYDADQAVAQFSLATTERGYQLPN | 394 |
| | | SSB | | GTRVPDRTDWHNIVMWGNLAKIVERYVHKGDRLYVEGKMRY | |
| | | | | RYYDDKKGQRRFIAEVYADNMELLTPRSAANTAADSTSQNTN | |
| | | | | AAANNANQNAASSSNASIASTEDDDQLPF | |
| SSB_161 | SSB | Viral- | Pseudomonas phage vB_Pae- | MARGVNKVILVGTCGQDPEVRYLPNGNAVTNLSLATSEQWTD | 395 |
| | | SSB | Kakheti25 | KQSGQKVERTEWHRVSLFGKVAEIAGEYLRKGSQVYIEGKLQT | |
| | | | | REWEKDGIKRYTTEIIVDMQGTMQLLGGRPQNQQGGGDQYNQ | |
| | | | | GGGNNYNQGGQQQQYNQAPQRQQAPRPQQQRPAPQQPAPQP | |
| | | | | AADFDSFDDDIPF | |
| SSB_162 | SSB | Bacterial- | Avibacterium paragallinarum | MAGVNKVIIVGNLGNDPEIRTMPNGEAVANISVATSESWMDK | 396 |
| | | SSB | JF4211 | NTGERREITEWHRIVFYRRQAEVAGEYERKGSKVYVEGRLRTR | |
| | | | | KWQDQNGQDRYTTEIQGDVLQMLDSRADRGQGGYSAQGGYA | |
| | | | | QQGSNQYAQPAQPSYQAPQQQAAARPSSPPTPMVDDNFDDDN | |
| | | | | IPF | |
| SSB_163 | SSB | Bacterial- | Streptomyces sp HPH0547 | MAMGDTPVTVVGNLVADPELKYTQSGTALARFTVASTPRSYD | 397 |
| | | SSB | | RESGQYKDGTAMFMRCSAWRGLAENIASSLAKGNRVVVTGRL | |
| | | | | RQHNWQTPEGENRSMLALEVDEIGPSLRFATAQPAKADNETK | |
| | | | | KTAPPADDPWNTTPAPAGGDEPPF | |
| SSB_164 | SSB | Bacterial- | Dermabacter sp HFH0086 | MANDTVITVVGNLTADPELRFTNSGIPVASFTVASTPRTFDRQS | 398 |
| | | SSB | | GEWKDGEALFLRCSIWRDAAENVAESLTKGTRVIVQGRLQQR | |
| | | | | SYTDREGNNRTSIELQVDEIGPSLRYATAKPTRTQRGGGGNFG | |
| | | | | GGFNGGNSGGGNYGGGQGGYSNQGGYGGNRGGAQGGPQGG | |
| | | | | QNPADVDPWSNGGAEEPPPF | |
| SSB_165 | SSB | Bacterial- | Treponema socranskii subsp | MTDINHVLVIGRLTRDFGADPRTFFYTTGGTACAKVSIAVNRS | 399 |
| | | SSB | socranskii VPI DR56BR1116 = | VKQSDGQWTDEVSFFDVTIWGKTAENLKPYLVKGKQIAVDGY | |
| | | | ATCC 35536 | LKQDRWQKDGQNFSKVNIVANSVQLLGGGTSAPESAPAPQNY | |
| | | | | GRVQETYRDNPSQVPPRMQGNYMQPQQPAYQTTAPQQQFGG | |
| | | | | GDDFPEDLPF | |
| SSB_166 | SSB | Bacterial- | Lactobacillus shenzhenensis | MINRVTLVGRLTQDVEVKHTESGIAVANFTVAVERHFKNAEGE | 400 |
| | | SSB | LY-73 | KQADFVTCKMWRKSAENFANFTCKGSLVGILGEVRTHTYEKD | |
| | | | | GQKVYRTDIEADTFALLEPKAVTEARRAGTLKSGSGGGSDNVF | |
| | | | | AAAGANGEKIDITDDDLPF | |
| SSB_167 | SSB | Bacterial- | Bifidobacterium magnum | MIQVTFTGNAGQDPETKTFNNGGSITQVNVGIGQGYKDRASGQ | 401 |
| | | SSB | | WIDKGTAWVTVKANTSQTKETLQHVHKGTHLLVTGSLTVRTY | |
| | | | | QKQDGTQGTALDVNATAIAIIPRKQQQMQQPQQPMQQPVQQP | |
| | | | | QQQNTWASMPTGTDPWSQGSFNQEPEF | |
| SSB_168 | SSB | Bacterial- | Borrelia duttonii CR2A | MISKEWKSGVGFMMMGVLMSDINNITLSGRLVKDSLLSYSSTN | 402 |
| | | SSB | | LAILNFSIANNIKVKREGEWEDNAQFFNCVLFGKRAETLFHFLS | |
| | | | | KGKQVVVNGSMRHEYYKNKHSEVNKIKSIIFVEQLRLFGADSK | |
| | | | | HHNPKVDIPIPVPPPVPDSACEFNEDIPF | |
| SSB_169 | SSB | Viral- | Pseudomonas phage | MRGVNKVILVGNVGGDPETRYMPNGNAVTNITLATSESWKDK | 403 |
| | | SSB | vB_PaeP_C1-14_Or, Pseudomonas | QTGQQQERTEWHRVVFFGKLAEIVGQHVKKGQQLYVEGSLRT | |
| | | | phage vB_PaeP_p2- | RKWQAQDGQDRYTTEIIVDMHGQMQMFGGKPGNEQAAQSRS | |
| | | | 10_Or1, Pseudomonas phage PaP3 | STQQQSAPQQRSAQDEFDDDIPL | |
| SSB_170 | SSB | Bacterial- | Mycobacterium brisbanense | MAGDTTITVIGNLTADPELRFTPSGAAVANFTVASTPRTFDRQT | 404 |
| | | SSB | | NEWKDGEALFLRCNIWREAAENVAESLTRGSRVIVQGRLKQRS | |
| | | | | FETREGEKRTVVELEVDEIGPSLRYATAKVNKASRSGGGGGGF | |
| | | | | GGGGGGFSGGGGGSRQSEPKDDPWGSAPASGSFSGADDEPPF | |
| SSB_171 | SSB | Bacterial- | Pseudoalteromonas lipolytica | MARGVNKVILVGNLGQDPEVRYMPNGNGVANISIATTDSWKD | 405 |
| | | SSB | SCSIO 04301 | KNTGQMQERTEWHRVVLFGKLAEVAGEYLRKGSQVYIEGRLQ | |
| | | | | TRKWTDQSGQEKFTTEIVVDMGGQMQMLGGRGGDQQGGGY | |
| | | | | QGGQSQGGYQGGQQQGGGYGGGSQQAQSNSYAPQQQSAPAP | |
| | | | | AQQQRPQQQPAPAPAPQQNNNQYGGYGQQQSSAPQQGGFAP | |
| | | | | KPQNAPQGGASNPMEPPIDFDDDIPF | |
| SSB_172 | SSB | Bacterial- | Candidatus Accumulibacter sp | MASVNKVILVGNLGADPETRYLPSGDAVCNIRMATTDRSRDK | 406 |
| | | SSB | SK-12 | VSGELKEYTEWHRVVFFGKLAETAGQYLKKGRQVYVEGRIRT | |
| | | | | NKWQDKEGNERYTTEIVANEMKMLGSREGMGAPAGEAEYGG | |
| | | | | SMPSAAGQAAGAARNAPARKTPGFEDMDDDIPF | |
| SSB_173 | SSB | Viral- | Listeria phage B054, Listeria | MMNRVVLVGRLTKDPELRYTPAGVAVATFTLAVNRPFKNAQ | 407 |
| | | SSB | monocytogenes | GEQEADFINCVVWRKPAENAANFLKKGSMAGVDGRVQTRNY | |
| | | | | EDSDGKRVFVTEVVAETVQFLEPKNINAEGATSNNYQNQANY | |
| | | | | SNNNKTSSYRADTSQKSDSFADEGKAIDINEDDLPF | |
| SSB_174 | SSB | Bacterial- | Hydrogenovibrio marinus | MRGVNKVILVGTLGRDPEMKYAANGNAIANLSLATSENWTDK | 408 |
| | | SSB | | NSGQKQEKTEWHRVVIFGKLAEIAGQYLTKGSQIYLEGKLQTR | |
| | | | | KWQDQNTGQDRYSTEVVIDFNGQMQMLGGGNKPQGQGAAP | |
| | | | | QGQGFAGQQPPQGQPMANQQQQAPQQNQQPQAGNQAAMQN | |
| | | | | QAPPMQQAPAYPENDFGDDDVPF | |
| SSB_175 | SSB | Viral- | Lactobacillus phage phig1e | MSINSVVLTGRLTKDVDLRATNSGKNVARFTLAVDRNFKSEQ | 409 |
| | | SSB | | QADFFTVSVWGKQAENTAKYCHKGSLVGVRGHLRSGSYDKN | |
| | | | | GQKVYFVDIEADSVQFLDTRNNSQDAPQSENLGAQSDFGFQSG | |
| | | | | QTYHSGADNSQSTFNSFGGTSQNDYPF | |
| SSB_176 | SSB | Bacterial- | Pedobacter antarcticus, | MSGINKVILVGHLGKDPEVRHLDGGVTVASFPLATSETYNKEG | 410 |
| | | SSB | Pedobacter antarcticus 4BY | KRIEQTEWHNIVLWRGLAEVASKYLQKGKEVYIEGKERTRSFE | |
| | | | | DKERVKKYVTEVVAENFTLLGRKSDFENTPVAAATPKHENDY | |
| | | | | VEPEDNATGDLPF | |
| SSB_177 | SSB | Bacterial- | Salinisphaera hydrothermalis | MASKGVNRAIILGNEGADPEVRHTAGGTAVANISVATSEVWT | 411 |
| | | SSB | C41B8 | DKNSGEKQERTEWHRVVAFARLAEVMGEFLKSGSKVYIEGKI | |
| | | | | QTRKWQNREGQDVYTTEIVANELQMLDSKPQGNAGAQSRAN | |
| | | | | NQAQNYGAASRGGAPARGGQQRQSPPQYQPPAGGDPGFDDDL | |
| | | | | DDDIPL | |
| SSB_178 | SSB | Bacterial- | Endozoicomonas montiporae, | MARGVNKVILIGNLGGDPDVRFTPNGSAVANFNVATSESWTD | 412 |
| | | SSB | Endozoicomonas montiporae CL- | KNTGQRQDRTEWHRVVVFGKLAEICQQYLRKGSKVYLEGKLQ | |
| | | | 33 | TRKWQDQQGQDRYTTEVVVDGFGGQMQMLDSRQDGGMGAV | |
| | | | | PNQMGGGYQQPQAAPQQQAPQQQAPQQRAPQQQYAAPQQQA | |
| | | | | QPQAQQRPAPAQQQAAPQPAAAGFDDFDDDIPF | |
| SSB_179 | SSB | Bacterial- | Nitratireductor basaltis | MAGSVNKVILVGNLGADPEIRRLNSGDPVVNLRIATSETWRDR | 413 |
| | | SSB | | GTGERRERTEWHNVVIFNDNLAKVAEQYLKKGAKVYLEGQL | |
| | | | | QTRKWQDQQGQDRYTTEVVLQKFRGELQMLDTRGQGGDNQI | |
| | | | | GYGGGGGGGQRSDFGQSSPAEPSGGGGGGGYSRDLDDEIPF | |
| SSB_180 | SSB | Bacterial- | Paenibacillus sp FSL R7-0331 | MLNRIILIGRLTRDPELRYTPAGVAVTQFTLAVDRNFTGQNGER | 414 |
| | | SSB | | EADFIPVVTWRQLAETCANYLRKGRLAAVEGRIQVRNYENNE | |
| | | | | GKRVYVTEVIADNVRFLESSQNREGGNAPSGGSMPEEPAFGGG | |
| | | | | NGGNSARGNNNNFSRSNNNQDPFSGDGKPIDISDDDLPF | |
| SSB_181 | SSB | Bacterial- | Burkholderia cenocepacia | MASVNKVILVGNLGADPEVRYLPSGDAVANIRLATTDRYKDK | 415 |
| | | SSB | (strain ATCC BAA-245/DSM | ASGDFKEMTEWHRVAFFGRLAEIVSEYLKKGSSVYIEGRIRTRK | |
| | | | 16553/LMG 16656/NCTC 13227/ | WQGQDGQDRYSTEIVADQMQMLGGRGGSGGGGGGGDEGGY | |
| | | | J2315/CF5610) (Burkholderia | GGGYGGGGGRGGEQMERGGGGGRAGGAARGGAGGGQSRPS | |
| | | | cepacia (strain | APAGGGFDEMDDDIPF | |
| | | | J2315)), Burkholderia | | |
| | | | cenocepacia BC7 | | |
| SSB_182 | SSB | Bacterial- | Bifidobacterium reuteri DSM | MGVNVSFTGNVGRDPETREFDNGRSLTTFSVGVSQGYYDQQN | 416 |
| | | SSB_23975 | | QWHDQGTMWITVECSPTAARQLPYVHKGVKLLVTGRLSQRFY | |
| | | | | QKKDGGQGSELRVYADAIGFLHRKDEQPQTGGFTGAQPQPPAS | |
| | | | | DPWAAPQSDTEPEF | |
| SSB_183 | SSB | Viral- | Lactococcus phage | MAIITVTAQANEKNTRTVNTAKGDKKIISVPLFEKEKGSNVKV | 417 |
| | | SSB | phi311, Lactococcus phage | AYGSAELPDFIQLGDTVTISGRVQAKESGEYVNYNFVFPTIEKV | |
| | | | ul36k1t1, Lactococcus phage | FISNDNGKQAQAKQDLFGGSEPIEVNTEDLPF | |
| | | | ul362, Lactococcus phage | | |
| | | | ul361, Lactococcus lactis, | | |
| | | | Lactococcus phage ul36k1 | | |
| SSB_184 | SSB | Bacterial- | Helicobacter sp MIT 05-5294 | MFNKVILVGNLTRDVELRYLPSGSALAKLGLAVNRRFKKQDG | 418 |
| | | SSB | | SQGDEVCYIDVNLFGRTAEVANQYLKRGSSVLIEGRLVLESWT | |
| | | | | DNNGQKRSKHSITAETMQMLGSRNEGGNYAGNGGGNGNYGN | |
| | | | | SYSNDSYNDMHNGGYNNYGSYQNTQPSAPKPQKPKENDIPEID | |
| | | | | IDDEEIPF | |
| SSB_185 | SSB | Viral- | Prochlorococcus phage P-SSM2 | MNHCLLEVTVKVAPTIRYTQDNQTAIAEMDVEFDGFRADDPP | 419 |
| | | SSB | | GSIKVVGWGNLAQDLQSHVQIGQRLIIEGRLRMNTVPRQDGSK | |
| | | | | EKRAEFTLSKIHSSTPKGTISPNKTSPNQVPSNDSPSLNALTSKEP | |
| | | | | ENPKSDNDSVTWNSSPLIPDTDDIPF | |
| SSB_186 | SSB | Viral- | Flavobacterium phage 1 lb | MNRQEFIGHIGNDAEVKDLGINQVINDSVAVSESYVNKTTNEKI | 420 |
| | | SSB | | TNTTWYECAKWGNNTQIAQYLKKGQQVYIMGKPNNRAWQN | |
| | | | | EQGDIKVVNAVKVTEILLLGGKQSNDNNAQPQQPQQQPQQPQ | |
| | | | | QAPQPQNNEDFNNSEEHDDLPF | |
| SSB_187 | SSB | Bacterial- | Paenibacillus sp P1XP2 | MLNRVILIGRLTKDPELRYTPAGVAVTQFTLAVDRPFTSQGGER | 421 |
| | | SSB | | EADFIPVVTWRQLAETCANYLRKGRLTAVEGRIQVRNYENNE | |
| | | | | GRRVYVTEVIADNVRFLESNREGGSGGGQGPREESSFGGGSRE | |
| | | | | NNNYSRSNSNQDPFFDDGKPIDISDDDLPF | |
| SSB_188 | SSB | Bacterial- | Mameliella alba | MAGSVNKVILVGNEGRDPETRTFQNGGKVCNLRIATSENWKD | 422 |
| | | SSB | | RNTGERRERTEWHSVAIFSEPLARIAEQYLRKGSKVYIEGQLET | |
| | | | | RKWQDQNGQDRYSTEVVLRPYRGELTLLDSRSEGGGGGGFGG | |
| | | | | GSGGGYGGGGGGYDDRGGYDDPGYGGGSGGGSGGGSGPSRA | |
| | | | | PARDIDDEIPF | |
| SSB_189 | SSB | Bacterial- | Sulfurovum sp ES06-10 | MNQFTGLGNLTRDIELRYLQNGSAIATCGLAMNRRFKKQDGT | 423 |
| | | SSB | | QGEEVCFIDITFFGRTAEIANQYLSRGRKVLIIGRLKLDQWTDQ | |
| | | | | QGVKRSKHSIHVESLEMIDSQNSEAQSTHPQPQAHNNQTQRQP | |
| | | | | QNTPRQPQSNPGQYSGHDIPDIDINDDEIPF | |
| SSB_190 | SSB | Bacterial- | Streptomyces cyaneogriseus | MNETMICAVGNVATHPVYRELASGPSARFRLAVTSRYWDREK | 424 |
| | | SSB | | SAWTDGHTNFFTVWAHRQLAANAAASLAVGDPVMVQGRLK | |
| | | | | VRTDVREGQSRTSADIDAVAIGHDETRGTSAFRRTNKPDSASTS | |
| | | | | PRPEPNWETPAAESGDPSEQQPTGEPALM | |
| SSB_191 | SSB | Viral- | Thalassomonas phage BA3 | MAGVNKVIILGNLGKDPEVRFMPNGGGVANLTIATSETWKDK | 425 |
| | | SSB | | QTGEQKEKTEWHRVVMFGKLAEIAGEYLKKGSKVYIEGQLQT | |
| | | | | RKWQNQQGQDQYTTEIVVQGFNGTMQMLDSRGQGGGGQGG | |
| | | | | GFQGQQQGGFSGGQQAPQQQGGFQQQAPKQQGGFSQQAAPQ | |
| | | | | QQGGFAQQAPQQQAPQQGGFSGGQQAPQQGGFQQQQGGFGQ | |
| | | | | QNQQQAAKVNPQEPSIDFDDDIPF | |
| SSB_192 | SSB | Bacterial- | Clostridium sp FS41 | MNSAQLVGRLTRDPEVRYSDGGTTVARFTLAVDRRFKKDGGD | 426 |
| | | SSB | | DADFINCVAFGKTAEFLEKWFRKGQRLGLTGRIQTGSYVNQEG | |
| | | | | TKVYTTEVVVENVEFVESKGASAGDGGPQQRPAPTSAIGDGFM | |
| | | | | NIPDGVEDDGLPFN | |
| SSB_193 | SSB | Bacterial- | Acetobacter orientalis 21F-2 | MAGSVNKVILVGNLGKDPEVRTTQGGQKIVSFSLATSDTWND | 427 |
| | | SSB | | RQSGERRERTEWHRVVVFNEREADVAERFLRKGRKVYLEGAL | |
| | | | | QTRKWTDQSGQERFTTEVIVERFRGELVLLDSRADNEGGQSNQ | |
| | | | | QPQPREQPRQQGGYGQQSNGWGGSSDEDDSIPF | |
| SSB_194 | SSB | Bacterial- | Microbacterium ginsengisoli | MAGETVITVVGNLTADPELRYTQNGLPVANFTIASTPRTFDRQ | 428 |
| | | SSB | | ANEWKDGEALFLRASVWREFAEHVAGSLTKGSRVIATGRLRQ | |
| | | | | RSYQDRDGNNRTAIELEVDEIGPSLRYATAQVTRAAGGSGAGG | |
| | | | | GGSRAQVADEPWSTPGSSNSSADAWSAPGAYGDDTPF | |
| SSB_195 | SSB | Viral- | Staphylococcus phage | MNTVNLIGNLVADPELKGQNNNVVNFVIAVQRQEKNKQTNEY | 429 |
| | | SSB | SA97, Staphylococcus phage | ETDFIRCVAFGKTAEIIANNFNKGNKIGVTGSIQTGSYENNQGQ | |
| | | | phi7247PVL, Staphylococcus | KVFTTDIAVNNITFVERKNTQAKHGLLTRN | |
| | | | phage phiETA3, Staphylococcus | | |
| | | | aureus, Staphylococcus phage | | |
| | | | phi5967PVL | | |
| SSB_196 | SSB | Bacterial- | Salinicoccus halodurans | MLNRVVLVGRLTKDPDLKVSQNNISVATFTLAVNRPFTSSNGE | 430 |
| | | SSB | | RGADFINCVVFRKQAENVNQYLKKGSLAGVDGRLQSRTYDNK | |
| | | | | DGQRVFVTEVVCDSVQFLEPKGQGGNQQQQYNNNSADSYTN | |
| | | | | AYGNQSTGSRPAPQQQSRQDNAEENPFANADGPVDISDDDLPF | |
| SSB_197 | SSB | Viral- | Lactobacillus phage phiadh | MINRVVLVGRLTRDPDELRYTNSGTSVASFTVAVDRNFTNQQG | 431 |
| | | SSB | | NREADFINCVVWGKSAENFANFTHKGSLVGIEGRIQTRSYENQ | |
| | | | | QGNRVYVTEVVTENFSLLESKAESDRYRAQHGGSASSAPRQQS | |
| | | | | QSSFGGNPYGAPANNQGSYQQDNAYGNGNNDAMQDPFAGNG | |
| | | | | SKTDISEDDLPF | |
| SSB_198 | SSB | Bacterial- | Microgenomates group bacterium | MSSRSLNKVQIIGNLTRDPELRYTPQGTAVCQIGVATNRSWTN | 432 |
| | | SSB | GW2011_GWF1_44_10 | DAGEKNEETEFHKVVAWSKLAEICSQLLKKGRKIYLEGRLQTR | |
| | | | | DWTTQDGQKRQTTEIVMDNMILLDSAGRGGDGEGASTSYTND | |
| | | | | DTSSKPVAKKSKKADVADDASSAEEAPVAEDVSDDIPF | |
| SSB_199 | SSB | Bacterial- | Parcubacteria group bacterium | MNLNKAFVLGNLTRDPELRTTTTGQSVAQFGVATNREFTDKS | 433 |
| | | SSB | GW2011_GWA2_42_14 | GQRQKLTEFHNIVAWGKLGELCHQYIKKGQSVFVEGRIQTRSW | |
| | | | | DDKQTGQKKYRTEIVAENVQFGPKPFRNETAGQNQAQPETPKE | |
| | | | | KEEILETVQYPADEEEIKPEEIPF | |
| SSB_200 | SSB | Bacterial- | Labilithrix luteola | MAEGLNKVMLLGNLGADPELKMTAGGQAVLKLRLATTETYL | 434 |
| | | SSB | | DRNNSRQERTEWHSVTLWGKRGEALAKFLSKGERIFVEGSLRT | |
| | | | | SSYEKDGEKRYRTEINATNVILAGRAGRGAGDEMGGGGGGGG | |
| | | | | GFGGGGGGGGGGGGGGFERRAPSRSGGGGGGGFEGGGRGAP | |
| | | | | ASAPPADDFGDYPGGDDEIPF | |
| SSB_201 | SSB | Bacterial- | Sphingopyxis sp (strain 113P3) | MAGSVNKVILIGNLGADPEIKSFQNGGKIANIRIATSESWKDRM | 435 |
| | | SSB | | TGERKERTEWHNVVINGDGLVGVVERYLKKGSKVYIEGSLRT | |
| | | | | RKWQDRDGNDRYTTEVVVAGMGGSLTMLDGAPGGGGSRTSG | |
| | | | | DSWNQGGGSSGGWDQGGSSGGGWNQGGGSSGGGRPPFDDDL | |
| | | | | DDDVPF | |
| SSB_202 | SSB | Bacterial- | Actinobacteria bacterium OK074 | MSNETIITVVGNLVDDPELRWTSSSVAVAKFRIASTPRTFDKQT | 436 |
| | | SSB | | NEWKDGESLFLTCSVWRQAAEHVAESLQRGMRVIVQGRLKQR | |
| | | | | SYEDREGVKRTVYELDVEELGPSLRNATAKVTKAGGSGQARE | |
| | | | | ALQQARTRSSREGREDPWASSGAAAESAQAGAWGDAPPF | |
| SSB_203 | SSB | Viral- | Thermus phage phiYS40 | DFIDPLEGRGRETLEDARGQPRLRHALNQVILMGNLTRDPDLR | 437 |
| | | SSB | | YTPQGTAVARLGLAINERRPGQGPDGERTHFIEVQAWRDLAE | |
| | | | | WAEELKRGEGLLVIGRLVNDSWTSSTGERRFQTRVEALRLERP | |
| | | | | TRGPERTGGSRPQEPERSVQTGGVDIDEGLEDFPPEEDLPF | |
| SSB_204 | SSB | Bacterial- | Lentibacillus amyloliquefaciens | MMNRVVLVGRLTRDPDLRYTPNGVAVANFRIAIDRPDSNQQG | 438 |
| | | SSB | | NRDADFINCVVWRRAAENLATYMKKGSMIGVDGRIQSRSFEG | |
| | | | | RDGNTVFVTEVVADNIQFLESKGTSQSRDQQPSGFQPNQNQNQ | |
| | | | | NQNQTTQTQTNENPFKDNGEPIDISDDDLPF | |
| SSB_205 | SSB | Viral- | Phormidium phage Pf-WMP3 | MAEIVQDPQLRYTSDNQTAITELLVQIDPLRDGDPPETLKVVA | 439 |
| | | SSB | | WRRLAEAVQENFHRGDRVVIEGRLGMVVFDRPEGFREKRAEV | |
| | | | | TAQRIHLLDRAAAGSAPPAAPTAAVPSSAPVTPMNGPANTPAN | |
| | | | | APAPVSSPDEPLSDDIPF | |
| SSB_206 | SSB | Bacterial- | Lactobacillus capillatus DSM | MINRAILVGRLTRDPDLRYTANGVAVATFTVAVNRQFTNQQG | 440 |
| | | SSB | 19910 | EREADFINCVIWRKSAENFANFTHKGSLVGVDGRIQTRSYENQ | |
| | | | | QGNRVYVTEIVVDSFSELESRSQSERYQQQHGADTQGSAPSQN | |
| | | | | SSNPNNDNLFGNSTKNNPPKARENNTDVDPFADSGKQIDISDD | |
| | | | | DLPF | |
| SSB_207 | SSB | Bacterial- | Candidatus Cloacimonas sp SDB | MTSELRLPRVNYVVLSGRLTRDVDLRFIPNGTPVAKLSLAFDR | 441 |
| | | SSB | | NYQKDGEWQQETSVIDVVVWSKRGEQCAEYLQKGSPVLIEGY | |
| | | | | IKTRSYQDKDNNNRKVTEIIASKINFLEKKPYSSEDDSETKNDSS | |
| | | | | DTNKSKADIIDDDVPF | |
| SSB_208 | SSB | Bacterial- | Roseateles depolymerans | MASVNKVIILGNLGRDPELRYTPSGSAVCNVSIATTRNWKSRE | 442 |
| | | SSB | | GGERQEETEWHRVVFYDRLAEIAGEYLKKGRPVYVEGRLKTR | |
| | | | | KWQDKEGKDNYTTEIIAETMQLLGGRDGGDDMGGGGGGGYN | |
| | | | | RERSSGGSRESSGGGSGRDAGDFDSPRAPAPRSAPRPAPAPAAK | |
| | | | | PATGFDDMDDDIPF | |
| SSB_209 | SSB | Bacterial- | Parcubacteria bacterium 32_520 | MNYNRAILCGRVTKAPEILMTPSGHKVAKISLATNEYQGKGKE | 443 |
| | | SSB | | EKTVFHNLIAWDRTADIAQQVIVVGHEIMIEGRIDNRTYKKKD | |
| | | | | GTKGYISEVVIDRLQLGNKPRAVAVPAENTATSNYQEPPADDD | |
| | | | | NVPVIEDMDEIDISSIPF | |
| SSB_210 | SSB | Bacterial- | Streptomyces longwoodensis | MAGETVITVIGNLVDDPELRFTPSGAAVAKFRVASTPRTFDRQT | 444 |
| | | SSB | | NEWKDGESLFLTCSVWRQAAENVAESLQRGMRVLVQGRLKQ | |
| | | | | RSYEDREGVKRTVYELDVEEVGPSLRNATAKVTKTAGRGGQG | |
| | | | | GGGGFGGGGGGQQGGGWGGGPGGGQQGGGAPADDPWATGA | |
| | | | | PAGGAQQGGGGWGGGSGGGGGYSDEPPF | |
| SSB_211 | SSB | Bacterial- | Streptomyces albus | MAGETVITVVGNLVDDPELRFTPSGAAVAKFRVASTPRTFDRQ | 445 |
| | | SSB | | TNEWKDGESEFLTCSVWRQAAENVAESLQRGMRVIVQGRLKQ | |
| | | | | RSYEDREGVKRTVFELDVDEVGASLRNATAKVTKTSGRGGQG | |
| | | | | GYGGGGGQGGGGWGGGSGGGQQGGGAPADDPWATGAPSGG | |
| | | | | QQGGGGGGWGGGSGNSGGYSDEPPF | |
| SSB_212 | SSB | Bacterial- | Pirellula sp SH-Sr6A | MASYNRVILLGNLVRDIELKYTTSRLAVCQNAIAVNERRKNAA | 446 |
| | | SSB | | GEWVDETSFVDVTFFGRTAEVVAEYLGKGSPIFVEGKLKQDT | |
| | | | | WEKDGQKRSKLYVIVDRMQLIGSRNESKGSGAPRPQSNGNRF | |
| | | | | ADQEQHVSPDMHVSEVGDGGFIDEDMPF | |
| SSB_213 | SSB | Bacterial- | Bacillus sporothermodurans | MMNRVVLVGRLTKDPDLRYTPSGVAVATFTLAVNRTFTNQQG | 447 |
| | | SSB | | EREADFINCVVWRKPAENVANFLKKGSLAGVDGRLQTRNYEG | |
| | | | | QDGKRVYVTEVVAESVQFLEPRNANANPNRGGNNDFYGGGQ | |
| | | | | GNQNTPFNQNQNQRNQGYTRVDEDPFSNDGQPIDISDDDLPF | |
| SSB_214 | SSB | Bacterial- | Akkermansia sp KLE1798 | MANLNKVFLMGNLTADPELRYTPKGTAVTDIRLAINRYYAGD | 448 |
| | | SSB | | NSERQEETTFVDVTLWNRQAEVAGNYLSKGRGVFVEGRLQLD | |
| | | | | SWEDKASGQKRTKLRVIGENIQLFPRGGDSSDMGGAPRQQSAP | |
| | | | | RSNNYGQSQAPQNYNPPPMPSNQQQSNDEGDMDDEIPF | |
| SSB_215 | SSB | Bacterial- | Coriobacteriales bacterium | MSINRVILSGNLTRTPELRSTANGSSVLGFGIAVNDRRKNPQTG | 449 |
| | | SSB | DNF00809 | EWEDFPNFIDCTVFGPRAEGLSHCLDKGSKISLEGKERWSQWE | |
| | | | | RDGQRRSKLEVIVDEIELMSTRGGQNFAANDHASADAGSYSQP | |
| | | | | YNAPSTPAAPPAVDPSSYNADLPF | |
| SSB_216 | SSB | Bacterial- | Streptomyces albulus | MAGETVITVVGNLVDDPELRFTPSGAAVAKFRVASTPRTFDRQ | 450 |
| | | SSB | | TNEWKDGESLFLTCSVWRQAAENVAESLQRGMRVVVQGRLK | |
| | | | | QRSYEDREGVKRTVFELDVEEVGPSLKNATAKVTKTTGRGGQ | |
| | | | | GGYGGGQQGGGNWGGAPGGGQQGGGAPADDPWATSAPAGG | |
| | | | | QQQGGGGNWGGSSGGSGGGYSDEPPF | |
| SSB_217 | SSB | Viral- | Salmonella phage SETP3 | MARGVNKVIIVGTLGNDPEVKYSASGSAIVNISVATSEQWKDK | 451 |
| | | SSB | | QTGEKKEQTEWHRIVIFGKLAEVAGEYLRKGSQVYIEGQLRTR | |
| | | | | KWTDSNGIDRYTTEIVIPQMGGVMQMLGGKRDDSGQQPRQQS | |
| | | | | GQQPQGGWVTNQQQQPQKQQSPQGGNEPPMDESDDIPF | |
| SSB_218 | SSB | Bacterial- | Streptomyces noursei | MAGETVITVVGNLVDDPELRFTPSGAAVAKFRVASTPRTFDRQ | 452 |
| | | SSB | | TNEWKDGESLFLTCSVWRQAAENVAESLTRGTRVIVQGRLKQ | |
| | | | | RSYEDREGVKRTVYELDVEEVGASLRNATAKVTKTGGRGGQG | |
| | | | | GGGFGGGQGGGQQGGGWGGGPGGGQQGGGAPADDPWATGG | |
| | | | | PSGGGQGGGGGWGGGSGGSGGGYSDEPPF | |
| SSB_219 | SSB | Viral- | Synechococcus phage Syn5 | MNHCLLEVEVIEAPQLRYTQDNQTPVAEMSVQFEGLRPDDPSG | 453 |
| | | SSB | | QIKVVGWGNLAQDLQNRVQVGQRLMLEGRLRISTITRADGLK | |
| | | | | EKRAEFTLSRLHPLAEGPSPAGDTRPAPLPPAGGQPRSVPRPVP | |
| | | | | ARAAVAGSTTAAAAIPATPAPEVPTWNTSPEVPELSDDDDIPF | |
| SSB_220 | SSB | Viral- | Streptomyces phage VWB | MAGETPITVVGNVVADPELRETPSGAPVANFRVASTPRTFDRV | 454 |
| | | SSB | | TNEWKDGDTLFLSVSVWRQQAENVAESIKRGDRVIVVGRLGQ | |
| | | | | RQYEKDGERKSSYEVQAEDVGPALKNATAQVAKNGQQNGQQ | |
| | | | | RAQGYGQGYGQQAPQQGYGAPQADQWSTQQPRQGYTDEPPF | |
| SSB_221 | SSB | Bacterial- | Lactococcus lactis subsp | MINNVVLVGRITRDPELRYTPQNQAVATFSLAVNRQFKNANGE | 455 |
| | | SSB | cremoris (strain MG1363) | READFINCVIWRQQAENLANWAKKGALIGVTGRIQTRNYENQ | |
| | | | | QGQRVYVTEVVADSFQMLESRSARDGMGGGASAGSYSAPSQS | |
| | | | | TNNTPRPQTNNNSATPNFGRDADPFGSSPMEISDDDLPF | |
| SSB_222 | SSB | Bacterial- | Lactococcus lactis subsp | MNKTMLIGRLTNAPEISKTTNNKSYVRVTLAVNRRFKNEKGER | 456 |
| | | SSB | cremoris (strain MG1363) | EADEISIIIWGKSAETLVSYAKKGSLISVEGEIRTRNYTDKNEQK | |
| | | | | HYITEILGLSYDLLESRATLALRESAVKTEELELEADELPF | |
| SSB_223 | SSB | Bacterial- | Lactococcus lactis subsp | MINNVTLVGRITKKPELRYTPQNKAVATFTLAVNRAFKNANGE | 457 |
| | | SSB | cremoris (strain MG1363) | READFISCVIWGKSAENLANWTHKGQLIGVIGNIQTRNYENQQ | |
| | | | | GQRVYITEVVASNFQVLEKSNQANGERVSNPAAKPQNNDSFGS | |
| | | | | DPMEISDDDLPF | |
| SSB_224 | SSB | Bacterial- | Mycobacterium smegmatis | MNMFETPFTVVGNIITNPVRLRFGDQELYKFRVASNSRRRSPEG | 458 |
| | | SSB | | TWEPGNSLYVTVNCWGNLARGVSASLGKGDSVVVVGHLYTN | |
| | | | | EYEDREGVRRSSVEVRATAVGPDLSRCIARVEKVQPSQGPRAD | |
| | | | | AGGDPERVPDDDVDRRDADDEPDDLADDDVADLAGDGLPLT | |
| | | | | A | |
| SSB_225 | SSB | Bacterial- | Staphylococcus aureus (strain | MLNRTILVGRLTRDPELRTTQSGVNVASFTLAVNRTFTNAQGE | 459 |
| | | SSB | Mu50/ATCC 700699) | READFINIIVFKKQAENVNKYLSKGSLAGVDGRLQTRNYENKE | |
| | | | | GQRVYVTEVIADSIQFLEPKNSNDTQQDLYQQQVQQTRGQSQY | |
| | | | | SNNKPVKDNPFANANGPIELNDDDLPF | |
| SSB_226 | SSB | Bacterial- | Staphylococcus aureus (strain | MLNRVVLVGRLTKDPEYRTTPSGVSVATFTLAVNRTFTNAQGE | 460 |
| | | SSB | Mu50/ATCC 700699) | READFINCVVFRRQADNVNNYLSKGSLAGVDGRLQSRNYENQ | |
| | | | | EGRRVFVTEVVCDSVQFLEPKNAQQNGGQRQQNEFQDYGQGF | |
| | | | | GGQQSGQNNSYNNSSNTKQSDNPFANANGPIDISDDDLPF | |
| SSB_227 | SSB | Bacterial- | Staphylococcus aureus (strain | MLNRTVLVGRLTKDPELRSTPNGVNVGTFTLAVNRTFTNAQG | 461 |
| | | SSB | Mu50/ATCC 700699) | EREADFINVVVFKKQAENVKNYLSKGSLAGVDGRLQTRNYEN | |
| | | | | KDGQRVFVTEVVADSVQFLEPKNNNQQQNNNYQQQRQTQTG | |
| | | | | NNPFDNNADSIEDLPF | |
| SSB_228 | SSB | Bacterial- | Caulobacter vibrioides (strain | MAGSVNKVILVGNEGADPEIRSLGSGDRVANLRIATSETWRDR | 462 |
| | | SSB | ATCC 19089/CB15) | SSGERKEKTEWHRVVIFNDNEVKVAEQYLRKGSTVYIEGALQT | |
| | | | (Caulobacter crescentus) | RKWTDNTGQEKYSTEIVLQKFRGELTMLGGRGGDAGMSSGGG | |
| | | | | DEYGGGYSGGGSSFGGGQRSQPSGPRESFSADLDDEIPF | |
| SSB_229 | SSB | Bacterial- | Vibrio natriegens NBRC 15636 = | MASRGINKVILVGNEGNDPEIRYMPNGGAVANITIATSDSWRD | 463 |
| | | SSB | ATCC 14048 = DSM 759 | KATGEQREKTEWHRVVLFGKLAEVAGEYLRKGSQVYVEGQL | |
| | | | | QTRKWQDQSGQDRYSTEVVVQGFNGVMQMLGGRAQGGAPA | |
| | | | | MGGQAPQQGGWGQPQQPAQPQYNAPQQQAPKQSAPQQPQQQ | |
| | | | | YNEPPMDFDDDIPF | |
| SSB_230 | SSB | Bacterial- | Synechocystis sp PCC 6803 | MSVNSIHLVGRAGRDPEVKYFESGNVVCNFTLAVNRRTSKKD | 464 |
| | | | SSB | EPPDWFDLEIWGKTAEIAGNYVKKGSLIGIQGSLKFDHWEDRN | |
| | | | | SGTPRSKPVIRVNNLDLLGSKRDNAEATMNNYPEEF | |
| SSB_231 | SSB | Bacterial- | Synechocystis sp PCC 6803 | MNSFVLMATVIREPELRFTKENQTPVCEFLVEFPGMRDDSPKES | 465 |
| | | SSB | | LKVVGWGNLANTIKETYHPGDRLIIEGRLGMNMIERQEGFKEK | |
| | | | | RAELTASRISLVDSGNGINPGELSSPPEPEAVDLSNTDDIPF | |
| SSB_232 | SSB | Bacterial- | Streptomyces albus J1074 | MAGETVITVVGNLVDDPELRFTPSGAAVAKFRVASTPRTFDRQ | 466 |
| | | SSB | | TNEWKDGESLFLTCSVWRQAAENVAESLQRGMRVIVQGRLKQ | |
| | | | | RSYEDREGIKRTVYELDVDEVGASLRNATAKVTKTTGRGGQG | |
| | | | | GYSGGGGGGGQQGGWGGGPGGGQQQGGGGAPADDPWATSA | |
| | | | | PSGGGQQQGGGGGWGGSSGGGGGYSDEPPF | |
| SSB_233 | SSB | Bacterial- | Streptomyces albus J1074 | MNETMVTVVGNVATAPVYRESAHGPMARFRMAATPRRWDRE | 467 |
| | | SSB | | RQTWTDGPTSFFTIWTTRQLASNVTASVTVGEPVIVQGRERVR | |
| | | | | ETERGGQQWTTAEIDAASVGHDLTRGTAAFRRVRKPVGTWPG | |
| | | | | GTATEDSRSAAAAQRAAGEPDWSVSGVGAGGDWGVAGGDRS | |
| | | | | GGGGEEPAEAGDRAEASAGTGTGTGTGGGEPEVEAVSPGPGA | |
| | | | | A | |
| SSB_234 | SSB | Bacterial- | Streptomyces coelicolor (strain | MNETMICAVGNVATTPVFRDLANGPSVRFRLAVTARYWDREK | 468 |
| | | SSB | ATCC BAA-471/A3(2)/M145) | NAWTDGHTNFFTVWANRQLATNASGSLAVGDPVVVQGRLKV | |
| | | | | RTDVREGQSRTSADIDAVAIGHDLARGTAAFRRTARTEASTSPP | |
| | | | | RPEPNWEVPAGGTPGEPVPEQRPDPVPVG | |
| SSB_235 | SSB | Bacterial- | Streptomyces coelicolor (strain | MAGETVITVVGNLVDDPELRFTPSGAAVAKFRVASTPRTFDRQ | 469 |
| | | SSB | ATCC BAA-471/A3(2)/M145) | TNEWKDGESLFLTCSVWRQAAENVAESLQRGMRVIVQGRLKQ | |
| | | | | RSYEDREGVKRTVYELDVDEVGASLRSATAKVTKTSGQGRGG | |
| | | | | QGGYGGGGGGQGGGGWGGGPGGGQQGGGAPADDPWATGG | |
| | | | | APAGGQQGGGGQGGGGWGGGSGGGGGYSDEPPF | |
| SSB_236 | SSB | Bacterial- | Synechococcus sp UTEX 2973 | MNSCILQATVVEAPQLRYTQDNQTPVAEMVVQFPGLSSKDAP | 470 |
| | | SSB | | ARLKVVGWGAVAQELQDRCRLNDEVVLEGRLRINSLLKPDGN | |
| | | | | REKQTELTVTRVHHLTLDSATGILAQEESEVSYGRSAAASAPV | |
| | | | | KASPVVTPTAAPDVDYDDIPF | |
| SSB_237 | SSB | Bacterial- | Synechococcus sp UTEX 2973 | MSLNVVNLVGRVGRDPEARYFESGSVVCKFSLAVNRRSRNDE | 471 |
| | | SSB | | PDWFNVEMWGREAQVAIDYVKKGSLIGISGALKIESWTDRNN | |
| | | | | NQRTTPVVRANRLELLGSRRDQEGGMAPRDPDSDLF | |
| PaSSB | SSB | | Pseudomonas aeruginosa | MARGVNKVILVGNVGGDPETRYMPNGNAVTNITLATSESWKD | 472 |
| | | | | KQTGQQQERTEWHRVVFF | |
| | | | | GRLAEIAGEYLRKGSQVYVEGSLRTRKWQGQDGQDRYTTEIV | |
| | | | | VDINGNMQLLGGRPSGDD | |
| | | | | SQRAPREPMQRPQQAPQQQSRPAPQQQPAPQPAQDYDSFDDDI | |
| | | | | PF | |

TABLE 2
Minimum inhibitory concentration (MIC) for various
combinations of ciprofloxacin resistance-conferring alleles.

| | Ciprofloxacin MIC |
|---|---|
| Genotype | (μg/ml) |
| PAO1 wild-type | 0.25 |
| nfxB knockout | 4 |
| GyrA_T83I | 16 |
| GyrA_T83I + | 32 |
| ParC_S87L | |
| GyrA_T83I + | >128 |
| ParC_S87L + NfxB | |
| knockout | |

### Materials and Methods

### Strains and Plasmids

[0195] A strain of Escherichia coli, which is derived from MG1655, but which has mutS knocked out, has a mutation in dnaG (Q576A) which decreases its affinity for single-stranded binding protein (SSB) at the replication fork, was used. A plasmid with beta lactamase (carb/amp resistance) on a p15a origin was used. Proteins were cloned by Gibson assembly under the control of the pBAD (arabinose) promoter.

[0196] The commonly studied strain of L. lactis, NZ9000, which features a nisin induction system was used. A plasmid with chloramphenicol acetyltransferase (chloramphenicol resistance) was used, built off of pJP005. Proteins were cloned by Gibson assembly under the control of a nisin-inducible promoter.

[0197] M. smegmatis strain MC2 155 was studied. A plasmid with a kanamycin resistance gene on a dual origin plasmid (colE1 and oriM) was used. Proteins were cloned by Gibson assembly under the control of a tetracycline-sensitive operator. TetR, the tetracycline operator repressor was also present on the plasmid.

### Culture, Induction and Transformation

[0198] E. coli cultures were grown in standard Lysogeny Broth (LB) at 37° C. in a rotating drum. Overnight cultures were diluted 1:100, grown for 90 minutes, and then single-stranded annealing proteins (SSAPs), or pairs of SSAPs and single-stranded binding proteins (SSBs) were induced with arabinose, grown another 30 minutes, and then prepared for transformation. Briefly, cells were put on ice, washed twice with cold water, and resuspended in 1/100^{th} culture volume of water.

[0199] L. lactis cultures were grown in M17 media supplemented with 0.5% glucose at 30° C. and not shaken. Overnight cultures were diluted 1:10 into M17 media supplemented with 0.5% w/v glucose, 0.5 M sucrose, and 2.5% w/v glycine. Diluted cultures were grown for three hours and then induced with 5 ng/μl nisin, grown another 30 minutes and then prepared for transformation. Briefly, cells were put on ice, washed twice with a cold buffer containing 0.5 M sucrose and 10% glycerol, resuspended in 1/100^{th} culture volume.

[0200] M. smegmatis cultures were grown in 7H9 media supplemented with 0.5% w/v BSA, 0.2% w/v glucose, 0.085% w/v NaCl, 0.05% v/v Tween 80, and 0.2% glycerol. Cultures were grown at 37° C. in a rolling drum for two days until confluent, then diluted 1:100 and grown overnight until OD600 reached 0.4-0.8. Cultures were then induced with 400 μg/ml anhydrotetracycline (ATC), put in the incubator for another hour, and then prepared for transformation. Briefly, cells were put on ice, washed twice with cold water, and resuspended in 1/100^{th} culture volume.

[0201] Unless otherwise noted, bacterial cultures were grown in Lysogeny-Broth-Lennox (LB^{L}) (10 g tryptone, 5 g yeast extract, 5 g NaCl in 1 L H₂O). Super optimal broth with catabolite repression (SOC) was used for recovery after electroporation. MacConkey agar (17 g pancreatic digest of gelatin, 3 g peptone, 10 g lactose, 1.5 g bile salt, 5 g NaCl, 13.5 g agar, 0.03 g neutral red, 0.001 g crystal violet in 1 L H₂O) and IPTG-X-gal Mueller-Hinton II agar (3 g beef extract, 17.5 g acid hydrolysate of casein, 1.5 g starch, 13.5 g agar in 1 L H₂O, supplemented with 40 mg/L X-gal and 0.2 μM IPTG) were used to differentiate LacZ(+) and (−) mutants. Cation-adjusted Mueller Hinton II Broth (MHBII) was used for antimicrobial susceptibility tests. Antibiotics were ordered from Sigma-Aldrich. Recombineering oligos were synthesized by Integrated DNA Technologies (IDT) or by the DNA Synthesis Laboratory of the Biological Research Centre (Szeged, Hungary) with standard desalting as purification.

### Oligo-Mediated Recombineering

[0202] Bacterial cultures (E. coli, K. pneumoniae, C. freundii, or P. aeruginosa) were grown in LB^{L} at 37° C. in a rotating drum. Overnight cultures were diluted 1:100, grown for 60 minutes or until OD600≈0.3, whereupon expression of SSAPs was induced for 30 minutes with 0.2% arabinose or 1 mM m-toluic acid as appropriate. Cells were then prepared for transformation. Briefly, E. coli, K. pneumoniae, and C. freundii cells were put on ice for approximately ten minutes, washed three times with cold water and resuspended in 1/100^{th} culture volume of cold water. This same procedure was followed for P. aeruginosa with the following differences: (1) Resuspension Buffer (0.5 M sucrose+10% glycerol) was used in place of water and (2) there was no pre-incubation on ice, as competent cell prep was carried out at room temperature, which was found to be much more efficient than preparation at 4° C. After competent cell prep, 9 μl of 100 μM oligo was added to 81 μl of prepared cells for a final oligo concentration of 10 μM in the transformation mixture (2.5 μM final oligo concentration was used for C. freundii and K. pneumoniae). This mixture was transferred to an electroporation cuvette with a 0.1 cm gap and electroporated immediately on a Gene Pulser (BioRad) with the following settings: 1.8 kV (2.2 kV in the case of P. aeruginosa), 200 Ω, 25 Cultures were recovered with SOC media for one hour and then 4 ml of LB with 1.25× selective antibiotic and 1.25× antibiotic for plasmid maintenance were added for outgrowth.

### Engineering of SEER Chassis

[0203] The E. coli strain described in this work as the SEER chassis is engineered from EcNR2 (Wang et al., Nature 460, 894-898 (2009)). EcNR2 harbors a small piece of λ-phage integrated at the bioAB locus, which allows expression of λ-Red genes, and a knockout of the methyl-directed mismatch repair (MMR) gene mutS, which improves the efficiency of mismatch inheritance (MG1655 ΔmutS::cat Δ(ybhB-bioAB)::[λc1857 Δ(cro-orf206b)::tetR-bla]). Modifications made to EcNR2 to engineer the SEER chassis include: 1. improvement of MAGE efficiency by mutating DNA primase (dnaG_Q576A) (Lajoie et al., Nucleic Acids Res. 40, e170 (2012)), 2. introduction of a handle for SDS selection (tolC_STOP), 3. introduction of a handle for CHL selection (mutS::cat_STOP), and 4. removal of lambda phage with a zeocin resistance marker Δ[λcI857 Δ(cro-orf206b)::tetR-bla]::zeoR, The final strain which was referred to as the SEER chassis is therefore: MG1.655 Δ(ybhB-bioAB)::zeoR ΔmutS::cat_STOP tolC_STOP dnaG_Q576A.

### Selective Allele Testing in the SEER Chassis

[0204] To complement the SEER chassis' two engineered selective handles, following native antibiotic resistance alleles were tested: [TMP: FolA P21→L, A26→G, and L28→R], [KAN/GEN: 16SrRNA U1406→A and A1408→G], [SPT: 16SrRNA A1191→G and C1192→U], [RIF: RpoB S512→P and D516→G], [STR: RpsL K4→R and K88→R], and [CIP: GyrA S83→L] (Novais et al., PLoS Pathog. 6, (2010); Criswell et al., Antimicrob. Agents Chemother. 50, 445-452 (2006); Campbell et al., Cell 104, 901-912 (2001); Okamoto-Hosoya et al., Microbiol. Read. Engl. 149, 3299-3309 (2003); Yoshida et al., Antimicrob. Agents Chemother. 34, 1271-1272 (1990)). 90-bp oligos conferring each mutation, with two PT bonds at their 5′ end and with complementarity to the lagging strand were designed. Two oligos were designed to repair the engineered selective handles: (1) elimination of a stop codon in the chloramphenicol acetyltransferase (cat) to confer CHM resistance and (2) elimination of a stop codon in tolC to confer SDS resistance. Oligo-mediated recombineering was run with Redβ expressed off of the pARC8 plasmid and the cultures were then plated onto a range of concentrations of the antibiotic to which the oligo was expected to confer resistance. Colony counts were made and compared to a water-blank control. Modifications targeted to provide TMP, KAN, and SPT resistance did not work adequately and so were dropped. RpsL_K43R was chosen for STR selection and RpoB_S512P for RIF selection, although in both cases there was not a significant observable difference between the two tested alleles. An antibiotic concentration was chosen that provided the largest selective advantage for those cultures transformed with oligo (Fig S2). The concentrations chosen for the selective antibiotics were: 0.1% v/v SDS, 25 μg/ml STR, 100 μg/ml RIF, 0.1 μg/ml CIP, and 20 μg/ml CHL.

### Identification of SSAP Library Members

[0205] To generate Broad SSAP Library a multiple sequence alignment of eight SSAPs was used that had been shown to function in E. coli (Redβ, EF2132 from Enterococcus faecalis, OrfC from Legionella pneumophila, 5065 from Vibrio cholerae, Plu2935 from Photorhabdus luminescens, Orf48 from Listeria monocytogenes, Orf245 from Lactococcus lactis, and Bet from Prochlorococcus siphovirus P-SS2 (Datta et al., Proc. Natl. Acad. Sci. U.S.A. 105, 1626-1631 (2008); Sullivan et al., Environ. Microbiol. 11, 2935-2951 (2009))) to generate a Hidden Markov Model that described the weighted positional variance of these proteins. Then non-redundant nucleotide and environmental metagenomic databases were queried using a web-based search interface (Finn et al., Nucleic Acids Res. 39, W29-W37 (2011)). Candidates were filtered based on gene size and annotation. Those that exhibited intra-sequence similarity of greater than 98% were removed from the group. Three eukaryotic SSAP homologs were added to the library (Eisen et al., Proc. Natl. Acad. Sci. U.S.A. 85, 7481-7485 (1988)). In total, Broad SSAP Library contains 120 members from the homology search, 8 members from the starting sequence alignment, and 3 eukaryotic members, or a total of 131 SSAP homologs.

[0206] Broad RecT Library was generated from the full alignment of Pfam family PF03837, containing 576 sequences from Pfam 31.0 (El-Gebali et al., Nucleic Acids Res. 47, D427-D432 (2019)). Using ETE 3, a phylogenetic tree made by FastTree and accessed from the Pfam31.0 database was pruned, and from it a maximum diversity subtree of 100 members was identified (Huerta-Cepas et al., Mol. Biol. Evol. 33, 1635-1638 (2016)). Five members of this group were found in Library 51, and so were excluded, and in their place six RecT variants from Streptomyces phages and eight other RecT variants were added that had previously reported activity or were otherwise of interest (Zhang et al., Nat. Genet. 20, 123-128 (1998); Sun et al., Appl. Microbiol. Biotechnol. 99, 5151-5162 (2015); Datta et al., Proc. Natl. Acad. Sci. U.S.A. 105, 1626-1631 (2008); van Pijkeren et al., Bioengineered 3, 209-217 (2012); van Kessel et al., Nat. Methods 4, 147-152 (2007)), bringing the library size to 109.

### Library Cloning

[0207] Diverse collections of SSAPs (PF03837) and SSBs (PF00436) were sourced from the Pfam database. A collection of ˜200 SSAPs was chosen to maximize for diversity of protein sequence. SSBs were then chosen from the organism (or a phylogenetically proximal organism) from which the SSAPs were sourced. Genes were codon-optimized for E. coli and synthesized by Twist Bioscience Corp. Genes were cloned into an entry vector by Gibson Assembly and then moved into vectors compatible with each of the three species by Golden Gate Assembly.

[0208] Broad SSAP Library and Broad RecT Library variants with a DNA barcode 22 nucleotides downstream of the stop codon were codon-optimized for E. coli and synthesized by Gen9 (S1) or Twist (S2). Synthesized DNA was amplified by PCR (NEB Q5 polymerase) and cloned into pDONR/Zeo (Thermo) by Gibson Assembly (NEB HiFi DNA Assembly Master Mix) and then moved into pARC8-DEST for arabinose-inducible expression. pARC8-DEST was engineered from a pARC8 plasmid (Choe et al., Biochem. Biophys. Res. Commun. 334, 1233-1240 (2005)) that shows good inducible expression in E. coli by moving Gateway sites (attR1/attR2), a CHL marker, and a ccdB counter-selection marker downstream of the pBAD-araC regulatory region (FIGS. 10A-10B). This enabled easy, one-step cloning of the entire library into pARC8-DEST by Gateway cloning (Thermo). The Gateway reaction was transformed into E. cloni Supreme electrocompetent cells (Lucigen), providing >10,000× coverage of both libraries in total transformants.

### Library Selection

[0209] Native resistance alleles were identified in each of the three species for resistance to rifampicin (rif) at the rpoB locus or streptomycin (stm) at the rpsL locus. The concentration of antibiotic necessary to confer a selective benefit to the resistant allele was determined for each strain. Libraries were transformed into the respective strains with at least 10× coverage, and ten successive cycles of MAGE editing followed by antibiotic selection were conducted to select for the SSAPs or SSAP/SSB pairs that most effectively conferred the antibiotic resistant allele via oligonucleotide-mediated recombineering. Rif and stm selections were performed in a non-resistant organism, and following these two rounds of selection, the plasmid library was mini-prepped and transformed back into the naïve parent strain. In this way, ten rounds of selection were performed two at a time. Fresh plasmid preparations and transformations were performed every two selection steps. In E. coli five different selective alleles were used, and so only one mini-prep and retransformation was necessary.

[0210] Libraries were mini-prepped (NEB Monarch Kit) and electroporated into the SEER chassis with more than 1,000-fold coverage. Five cycles of oligo-mediated recombineering followed by antibiotic selection were then conducted (FIG. 1B). 5 μl of the 5 ml recovery from the recombineering step was immediately plated onto LBL+selective antibiotic plates to estimate the total throughput of the selective step. This allowed us to ensure that the library was never bottlenecked—the first round of selection was the most stringent, but it was ensured that there was >500× coverage at this stage. Following five rounds of selection, the plasmid library was mini-prepped and transformed back into the naïve parent strain, followed by five further rounds of selection (ten in total). After each selective step a 100 μl aliquot of the antibiotic-selected recovery was frozen down at −80° C. in 25% glycerol for analysis by NGS.

### Efficiency Testing

[0211] The efficiency of each SSAP or SSAP/SSB pair was measured by expressing them off of their host-specific plasmid in the naïve parent strain and running a recombineering cycle with an oligo that confers a 4-nucleotide non-coding mismatch in a non-essential gene. The allele was then amplified by PCR and editing efficiency was measured by next-generation sequencing.

### Next Generation Sequencing of Libraries

[0212] Primers were designed to amplify a 215 bp product containing the barcode region of the SSAP libraries from the pARC8 plasmid and to add on Illumina adaptors. PCR amplification was done with Q5 polymerase (NEB) performed on a LightCycler 96 System (Roche), with progress tracked by SYBR Green dye and amplification halted during the exponential phase. Barcoding PCR for Illumina library prep was performed as just described, but with NEBNext Multiplex Oligos for Illumina Dual Index Primers Set 1 (NEB). Barcoded amplicons were then purified with AMPure XP magnetic beads (Beckman Coulter), pooled, and the final pooled library was quantified with the NEBNext Library Quant Kit for Illumina (NEB). The pooled library was diluted to 4 nM, denatured, and a paired end read was run with a MiSeq Reagent Kit v3, 150 cycles (Illumina). Sequencing data was downloaded from Illumina, sequences were cleaned with Sickle (Joshi et al., Sickle: A sliding-window, adaptive, quality-based trimming tool for FastQ files. (2019)) and analyzed with custom scripts written in Python.

Measuring recombineering efficiency in E. coli by NGS

[0213] To measure single locus editing, a recombineering cycle was run with an oligo that confers a single base pair non-coding mismatch in a non-essential gene. The allele was then amplified by PCR and editing efficiency was measured by NGS as described above. To test multiplex editing, the concentration of oligo was held fixed (10 μM in the final electroporation mixture), but the total number of oligos in the mixture was varied. Pools of oligos to test editing at 5, 10, 15, or 20 alleles simultaneously were designed so as to space the edits relatively evenly around the genome. The 5-oligo pool contained oligo #'s 3,7,11,15,17, the 10-oligo pool added oligo #'s 1,5,9,13,19, the 15-oligo pool added oligo #'s 4,8,12,16,18, and the final 20-oligo pool contained silent mismatch MAGE oligos. One locus (locus 8) showed major irregularities when sequenced, and so it was eliminated from the analysis.

DIvERGE-Based Simultaneous Mutagenesis of gyrA, gyrB, parE, and parC

[0214] A single round of DIvERGE mutagenesis was carried out to simultaneously mutagenize gyrA, gyrB, parE, and parC in E. coli MG1655 by the transformation of an equimolar mixture of 130 soft-randomized DIvERGE oligos, tiling the four target genes. The sequences and composition of these oligos were published previously (Nyerges, A., et. al, PNAS, 2018). To perform DIvERGE, 4 μl of this 100 μM oligo mixture was electroporated into E. coli K-12 MG1655 cells expressing Redβ from pORTMAGE311B, PapRecT from pORTMAGE312B, or CspRecT from pORTMAGE-Ec1, in 5 parallel replicates according to a previously described protocol (Szili et al., Antimicrob. Agents Chemother. AAC.00207-19 (2019)). Following electroporation, the replicates were combined into 10 ml fresh TB media. Following recovery for 2 hours, cells were diluted by the addition of 10 ml LB and allowed to reach stationary phase at 37° C., 250 rpm. Library generation experiments were performed in triplicates. Following library generation, 1 mL of outgrowth from each library was subjected to 250, 500, and 1,000 ng/mL ciprofloxacin (CIP) stresses on 145 mm-diameter LB-agar plates. Colony counts were determined after 72 hours of incubation at 37° C., and individual colonies were subjected to further genotypic (i.e., capillary DNA sequencing) analysis and phenotypic (i.e., Minimum Inhibitory Concentration) measurements.

pORTMAGE Plasmid Construction and Optimization

[0215] Cloning reactions were performed with Q5 High-Fidelity Master Mix and HiFi DNA Assembly Master Mix (New England Biolabs). pORTMAGE312B (Addgene plasmid) and pORTMAGE-Ec1 (Addgene plasmid) were constructed by replacing the Redβ open reading frame (ORF) of pORTMAGE311B plasmid (Addgene plasmid 120418) (Szili et al., bioRxiv 495630 (2018) doi:10.1101/495630) with PapRecT and CspRecT respectively. pORTMAGE-Pa1 was constructed in many steps: i.) the Kanamycin resistance cassette and the RSF1010 origin-of-replication on pORTMAGE312B with Gentamicin resistance marker and pBBR1 origin-of-replication, amplified from pSEVA631 (Martinez-Garcia et al., Nucleic Acids Res. 43, D1183-D1189 (2015)), ii.) optimization of RBSs in pORTMAGE-Pa1 was done by designing a 30-nt optimal RBS in front of the SSAP ORF and in between the SSAP and MutL ORFs with an automated design program, De Novo DNA (Salis et al., Nat. Biotechnol. 27, 946-950 (2009)), iii.) PaMutL was amplified from Pseudomonas aeruginosa genomic DNA and cloned in place of EcMutL_E32K, and finally iv.) PaMutL was mutated by site-directed mutagenesis to encode E36K. Ssr and Rec2 were ordered as gblocks from IDT and cloned in place of PapRecT into earlier versions of pORTMAGE-Pa1 for the comparisons in FIG. 12.

### Measuring Recombineering Efficiency in Gammaproteobacteria by Selective Plating

[0216] Oligos were designed to introduce I) premature STOP codons into lacZ for E. coli, K. pneumoniae, and C. freundii, or II) RpsL K43→R; GyrA T83→I; ParC S83→L; RpoB D521→V, or a premature STOP codon into nfxB for P. aeruginosa. Oligo-mediated recombineering was performed as described above on all bacterial strains. After recovery overnight, cells were plated at empirically-determined dilutions to a density of 200-500 colonies per plate. In the case of LacZ screening, plating was assayed on MacConkey agar plates or on X-Gal/IPTG LB^{L} agar plates in the case of K. pneumoniae. In the case of selective antibiotic screening, cultures were plated onto both selective and non-selective plates. Selective antibiotic concentrations used were the same as those described for the selective testing above, except that in P. aeruginosa 100 μg/ml STR and 1.5 μg/ml CIP were used unless otherwise noted. Variants that were resistant to multiple antibiotics were selected on LB^{L} agar plates that contained the combination of all corresponding antibiotics. Non-selective plates were antibiotic-free LB^{L} agar plates. In all cases, allelic-replacement frequencies were calculated by dividing the number of recombinant CFUs by the number of total CFUs. Plasmid maintenance was ensured by supplementing all media and agar plates with either KAN (50 μg/ml) or GEN (20 μg/ml).
Minimum Inhibitory Concentration (MIC) Measurement in P. aeruginosa

[0217] MICs were determined using a standard serial broth microdilution technique according to the CLSI guidelines (ISO 20776-1:2006, Part 1: Reference method for testing the in vitro activity of antimicrobial agents against rapidly growing aerobic bacteria involved in infectious diseases). Briefly, bacterial strains were inoculated from frozen cultures onto MHBII agar plates and were grown overnight at 37° C. Next, independent colonies from each strain were inoculated into 1 ml MHBII medium and were propagated at 37° C., 250 rpm overnight. To perform MIC tests, 12-step serial dilutions using 2-fold dilution-steps of the given antibiotic were generated in 96-well microtiter plates (Sarstedt 96-well microtest plate). Antibiotics were diluted in 100 μl of MHBII medium. Following dilutions, each well was seeded with an inoculum of 5×10⁴ bacterial cells. Each measurement was performed in 3 parallel replicates. Plates were incubated at 37° C. under continuous shaking at 150 rpm for 18 hours in an INFORS HT shaker. After incubation, the OD₆₀₀ of each well was measured using a Biotek Synergy 2 microplate reader. MIC was defined as the antibiotic concentration which inhibited the growth of the bacterial culture, i.e., the drug concentration where the average OD600 increment of the three replicates was below 0.05.

### REFERENCES

[0218] 1 Yu, D. et al. An efficient recombination system for chromosome engineering in Escherichia coli. Proceedings of the National Academy of Sciences of the United States of America 97, 5978-5983, doi:10.1073/pnas.100127597 (2000).
[0219] 2 Ellis, H. M., Yu, D., DiTizio, T. & Court, D. L. High efficiency mutagenesis, repair, and engineering of chromosomal DNA using single-stranded oligonucleotides. Proceedings of the National Academy of Sciences of the United States of America 98, 6742-6746, doi:10.1073/pnas.121164898 (2001).
[0220] 3 Little, J. W. An exonuclease induced by bacteriophage λ. Journal of Biological Chemistry 242, 679-686 (1967).
[0221] 4 Caldwell, B. J. et al. The Redβ single strand annealing protein of bacteriophage λ carries its own mediator domain to couple DNA end-resection with annealing at the replication fork. In Submission at Nucleic Acids Research (2018).
[0222] 5 Li, Z., Karakousis, G., Chiu, S. K., Reddy, G. & Radding, C. M. The beta protein of phage lambda promotes strand exchange. Journal of molecular biology 276, 733-744, doi:10.1006/jmbi.1997.1572 (1998).
[0223] 6 Murphy, K. C. Lambda Gam protein inhibits the helicase and chi-stimulated recombination activities of Escherichia coli RecBCD enzyme. Journal of bacteriology 173, 5808-5821, doi:10.1128/jb.173.18.5808-5821.1991 (1991).
[0224] 7 Costantino, N. & Court, D. L. Enhanced levels of λ Red-mediated recombinants in mismatch repair mutants. Proceedings of the National Academy of Sciences of the United States of America, doi:10.1073/pnas.2434959100 (2003).
[0225] 8 Mosberg, J. A., Gregg, C. J., Lajoie, M. J., Wang, H. H. & Church, G. M. Improving lambda red genome engineering in Escherichia coli via rational removal of endogenous nucleases. PloS one 7, doi:10.1371/journal.pone.0044638 (2012).
[0226] 9 Lajoie, M. J. et al. Genomically recoded organisms expand biological functions. Science (New York, N.Y.) 342, 357-360, doi:10.1126/science.1241459 (2013).
[0227] 10 Mandell, D. J. et al. Biocontainment of genetically modified organisms by synthetic protein design. Nature 518, 55-60, doi:10.1038/nature14121 (2015).
[0228] 11 Pirman, N. L. et al. A flexible codon in genomically recoded Escherichia coli permits programmable protein phosphorylation. Nature Communications, doi:10.1038/ncomms9130 (2015).
[0229] 12 Wannier, T. M. et al. Adaptive evolution of genomically recoded Escherichia coli. Proceedings of the National Academy of Sciences of the United States of America 115, 3090-3095, doi:10.1073/pnas.1715530115 (2018).
[0230] 13 Wang, H. H. et al. Programming cells by multiplex genome engineering and accelerated evolution. Nature 460, 894 (2009).
[0231] 14 Ioerger, T. R. et al. Identification of new drug targets and resistance mechanisms in Mycobacterium tuberculosis. PLOS ONE, doi:10.1371/journal.pone.0075245 (2013).
[0232] 15 Pijkeren, J.-P. & Britton, R. A. High efficiency recombineering in lactic acid bacteria. Nucleic Acids Research 40, doi:10.1093/nar/gks147 (2012).
[0233] 16 Huttenhower, C. et al. Structure, function and diversity of the healthy human microbiome. Nature 486, 207-214, doi:10.1038/nature11234 (2012).
[0234] 17 Keseler, I. M. et al. The EcoCyc database: reflecting new knowledge about Escherichia coli K-12. Nucleic Acids Research 45, doi:10.1093/nar/gkw1003 (2016).
[0235] 18 Yarza, P. et al. Uniting the classification of cultured and uncultured bacteria and archaea using 16S rRNA gene sequences. Nature Reviews Microbiology 12, 635, doi:10.1038/nrmicro3330 (2014).
[0236] 19 Opijnen, V. T., Bodi, K. L. & Camilli, A. Tn-seq: high-throughput parallel sequencing for fitness and genetic interaction studies in microorganisms. Nature Methods 6 (2009).
[0237] 20 Gilbert, L. A. et al. Genome-scale CRISPR-mediated control of gene repression and activation. Cell (2014).
[0238] 21 Baba, T. et al. Construction of Escherichia coli K-12 in-frame, single-gene knockout mutants: the Keio collection. Molecular Systems Biology (2006).
[0239] 22 Price, M. N. et al. Mutant phenotypes for thousands of bacterial genes of unknown function. Nature 557, 503-509, doi:10.1038/s41586-018-0124-0 (2018).
[0240] 23 Pawluk, A. et al. Inactivation of CRISPR-Cas systems by anti-CRISPR proteins in diverse bacterial species. Nature Microbiology 1, 16085, doi:10.1038/nmicrobiol.2016.85 (2016).
[0241] 24 Evers, B. et al. CRISPR knockout screening outperforms shRNA and CRISPRi in identifying essential genes. Nature Biotechnology, doi:10.1038/nbt.3536 (2016).
[0242] 25 Macosko, E. Z. et al. Highly parallel genome-wide expression profiling of individual cells using nanoliter droplets. Cell 161, 1202-1214 (2015).
[0243] 26 Kizer, L., Pitera, D. J., Pfleger, B. F. & Keasling, J. D. Application of functional genomics to pathway optimization for increased isoprenoid production. Applied and Environmental Microbiology 74, 3229-3241, doi:10.1128/AEM.02750-07 (2008).
[0244] 27 Kunjapur, A. M. & Prather, K. L. J. Microbial Engineering for Aldehyde Synthesis. Applied and Environmental Microbiology 81, 1892-1901, doi:10.1128/AEM.03319-14 (2015).
[0245] 28 Li, Q., Du, W. & Liu, D. Perspectives of microbial oils for biodiesel production. Applied Microbiology and Biotechnology 80, 749-756, doi:10.1007/s00253-008-1625-9 (2008).
[0246] 29 Kunjapur, A. M., Tarasova, Y. & Prather, K. L. J. Synthesis and Accumulation of Aromatic Aldehydes in an Engineered Strain of Escherichia coli. Journal of the American Chemical Society 136, 11644-11654, doi:10.1021/ja506664a (2014).
[0247] 30 Pitera, D. J., Paddon, C. J., Newman, J. D. & Keasling, J. D. Balancing a heterologous mevalonate pathway for improved isoprenoid production in Escherichia coli. Metabolic engineering 9 (2007).
[0248] 31 Temme, K., Zhao, D. & Voigt, C. A. Refactoring the nitrogen fixation gene cluster from Klebsiella oxytoca. Proceedings of the National Academy of Sciences of the United States of America 109, 7085-7090, doi:10.1073/pnas.1120788109 (2012).
[0249] 32 Wang, L. et al. A minimal nitrogen fixation gene cluster from Paenibacillus sp. WLY78 enables expression of active nitrogenase in Escherichia coli. PLoS Genetics 9, doi:10.1371/journal.pgen.1003865 (2013).
[0250] 33 Shiba, Y., Paradise, E. M., Kirby, J., Dai-Kyun, R. & Keasling, J. D. Engineering of the pyruvate dehydrogenase bypass in Saccharomyces cerevisiae for high-level production of isoprenoids. Metabolic Engineering 9, 160-168 (2007).
[0251] 34 Wang, H. H. et al. Genome-scale promoter engineering by coselection MAGE. Nature Methods 9, 591-593, doi:10.1038/nmeth.1971 (2012).
[0252] 35 Isaacs, F. J. et al. Precise manipulation of chromosomes in vivo enables genome-wide codon replacement. Science (New York, N.Y.) 333, 348-353, doi:10.1126/science.1205822 (2011).
[0253] 36 Chmielewska-Jeznach, M., Bardowski, J. K. & Szczepankowska, A. K. Molecular, physiological and phylogenetic traits of Lactococcus 936-type phages from distinct dairy environments. Scientific reports 8, 12540, doi:10.1038/s41598-018-30371-3 (2018).

### Example 10

[0254] To understand the host-tropism displayed by RecT's, a simplified in-vitro model of oligonucleotide annealing that includes bacterial SSBs, a key host protein that coats ssDNA at the replication fork was developed. It was first whether two 90 bp oligos could anneal if they were pre-coated with SSB. SSBs was purified from E. coli (gram-negative), where most recombineering work has been performed, and L. lactis (gram-positive), a lactic acid bacterium phylogenetically distantly related to E. coli. Using fluorescence quenching to measure annealing, it was found that while the free oligos annealed together slowly (FIGS. 17A-17B), both EcSSB and L1SSB completely inhibited oligonucleotide annealing. It was next tested capacity of a phage RecT protein to overcome this SSB-mediated inhibition of annealing. Thus, Redβ, which is not broadly portable, but mediates efficient oligonucleotide annealing in E. coli, was purified. It was found that adding Redβ overcame the inhibitory effect of EcSSB but not L1SSB, rapidly annealing the EcSSB-coated two oligos together (FIGS. 17A and 17C). These preliminary results gave us an indication that while bacterial SSBs inhibit oligonucleotide annealing in vitro, RecTs overcome the inhibitory effect in an SSB-specific manner.

[0255] To validate this result in vivo, an assay was developed to measure the portability of RecT proteins. Four variants known to enable high genome editing efficiency were selected (Redβ and PapRecT in E. coli, LrpRecT in L. lactis, and MspRecT in M. smegmatis), and tested codon optimized versions of all four in both E. coli (gram-negative), and L. lactis (gram-positive). Genome editing efficiency was measured by introducing oligos encoding known antibiotic resistance mutations, and compared the antibiotic resistant cell counts to the total number of viable cells in the population (FIGS. 17E-17F). In E. coli, Redβ and PapRecT functioned well, and improved oligo incorporation 1600-fold and 2700-fold respectively, while MspRecT (290-fold improvement) and LrpRecT (5.6-fold improvement) were less effective (FIG. 17G). In L. lactis, LrpRecT was the only functional homolog, and improved oligo incorporation 7,700-fold, while the three other RecT variants were nearly non-functional, improving oligo incorporation less than 7-fold (FIG. 17H). No RecT protein functioned well both in E. coli and L. lactis. This agrees with previous studies, which have found that RecT proteins are usually not portable between distantly related bacterial species.

[0256] If interaction with the bacterial SSB is required for phage RecT functionality, one solution to establishing recombineering in a new species would be to replace the host SSB with one compatible with the chosen RecT. However, SSB proteins are essential, and mutations to SSB can result in severe growth defects. Therefore, it was evaluated if temporary overexpression of an exogenous SSB could supply the necessary requirements for recombineering and improve the activity of non-host compatible RecTs. SSBs corresponding to each RecT protein were synthesized and tested the activity of all four cognate RecT-SSB pairs in L. lactis and E. coli. Co-expression of a cognate bacterial SSB improved the genome editing efficiencies of all RecTs with low host-compatibility (FIGS. 17G-17H). The best performing pairs, Redβ+EcSSB and PapRecT+PaSSB demonstrated 483-fold and 1,168-fold improved editing efficiencies over the RecT proteins alone in L. lactis, and still maintained high activity in E. coli (FIGS. 17G-17H). In E. coli, co-expression with cognate SSBs also significantly reduced the toxicity of these two pairs (data not shown). These results, especially in L. lactis, indicate that the presence of a cognate bacterial SSB can overcome the host incompatibility of RecT proteins if moved to new species.

### Example 11

[0257] It was next investigated which domains on SSB were involved in mediating the RecT protein interaction. A SSB domain-specific model for understanding RecT protein portability would be far more informative than previous models, which relied on phylogenetic relationships between the host organisms. RecT proteins have been shown to function in species with SSBs with relatively divergent sequences. Therefore, there was interest in identifying conserved domains responsible for maintaining the RecT protein interaction. For example, while Redβ works well in E. coli, Salmonella enterica, and Citrobacter freundii which have SSBs with 88% identity, PapRecT works in E. coli and Pseudomonas aeruginosa, which have SSBs of only 59% identity. To investigate the specific residues involved, the genome editing assay was used in L. lactis and the effect of co-expressing RecT proteins with non-cognate or mutated SSBs was evaluated.

[0258] The importance of the SSB C-terminal tail was evaluated by coexpressing Redβ in L. lactis, along with a version of EcSSB that had a 9-amino-acid C-terminal deletion (EcSSBΔ9) (FIG. 18A). In L. lactis, the genome editing efficiency of Redβ with EcSSBΔ9 was 44-fold lower than Redβ with EcSSB, indicating a key role for the C-terminal domain in the SSB-mediated efficiency improvement (FIG. 18c). Next, Redβ was co-expressed with the L. lactis SSB (L1SSB). Co-expression of Redβ with L1SSB performed similarly to Redβ with EcSSBΔ9, and improved genome editing efficiency 38.5-fold less than Redβ with EcSSB. Then, Redβ was co-expressed with chimeric versions of the L1SSB, where up to 9 amino acids of the L1SSB C-terminal tail were replaced with their corresponding residues from EcSSB. Swapping the last 7 C-terminal residues (L1SSB C7:EcSSB) improved editing rates to within 5.9-fold of Redβ with EcSSB, and swapping the last 8 C-terminal residues (L1SSB C8:EcSSB) improved editing rates within 2.6-fold of Redβ with EcSSB. These results support a model where Redβ specifically recognizes at minimum the 7 C-terminal acids of E. coli SSB, but not that of L. lactis SSB.

[0259] To evaluate if the SSB C-terminal 7 amino acids also affected the compatibility of the other two non-host compatible RecT proteins, similar SSB-chimera experiments were performed with PapRecT and MspRecT in L. lactis. The genome editing efficiency of PapRecT with the L. lactis SSB was 135-fold less than when using the cognate pair (FIG. 18E). However, this defect was completely recovered when PapRecT was co-expressed with L. lactis SSB chimeras where either the last 7 or 8 C-terminal resides were replaced (L1SSB C7:PaSSB, L1SSB C8:PaSSB) (FIG. 18E). For MspRecT, the genome editing efficiency with L1SSB was 33-fold lower than when using the cognate pair (FIG. 18F). Again, the defect was completely recovered when MspRecT was co-expressed with L. lactis SSB chimeras where either the last 7 or 8 C-terminal resides were replaced (L1SSB C7:MsSSB, L1SSB C8:MsSSB) (FIG. 18F). Since the chimeric L1SSBs greatly improved the functionality of non-host compatible RecT proteins, while the wild-type L1SSB did not, the RecT-SSB interaction seems to be both specific and relatively modular, with the 7 C-terminal amino acids acting as the critical interaction domain.

[0260] These results provide a molecular basis for the portability of RecT proteins between species which have host SSBs with a conserved C-terminal tail. Specifically, although the SSBs have only 59% identity, the P. aeruginosa and E. Coli SSBs have a perfectly conserved 7 amino acid C-terminal tail domain (FIG. 19C), supporting the functionality of PapRecT in E. coli. Additionally, E. coli, Salmonella enterica and Citrobacter freundii SSBs all have a perfectly conserved 7 amino acid C-terminal tails, supporting the portability of Redβ between these species (FIG. 19C).

### Example 12

[0261] Some RecT proteins are known to be portable between species which have distinct SSB C-terminal tails. To better characterize the network of RecT-SSB compatibility among the proteins analyzed here, all four RecTs were co-expressed with all four SSBs in both E. coli and L. lactis (FIGS. 19A-19B). It was found that the effects of PaSSB and EcSSB on RecT-mediated editing efficiency were relatively interchangeable, as might be expected since they share the same 7 amino acid C-terminal tail (FIG. 19C). Interestingly, PapRecT displayed the characteristics of a more portable RecT protein, and showed compatibility with MsSSB and EcSSB/PaSSB, even though their 7AA C-terminal tail sequences are distinct (FIGS. 19A and 19C). Importantly, co-expressing PapRecT with LrSSB did not provide a substantial improvement in genome editing efficiency in L. lactis, even though the 7 C-terminal tail amino acids of LrSSB differ only by a single residue from MsSSB (FIGS. 19A and 19C).

[0262] To test if PapRecT specifically interacts with the C-terminal tail of MsSSB, PapRecT was co-expressed with a chimeric version of LrSSB, with either the C7 or C8 amino acids matching that of MsSSB (FIG. 19D). The chimeric constructs demonstrated the same editing efficiency as PapRecT+MsSSB, showing that a single amino acid change was sufficient to enable compatibility between the proteins (FIG. 19D). The compatibility of PapRecT with the distinct EcSSB/PaSSB and MsSSB tails but not the LrSSB tail affirms that while the SSB C-terminal tail has a critical role in the RecT-SSB interaction, there can be flexibility in the specific motif recognized.

We next evaluated if the interaction between PapRecT and MsSSB in L. lactis indicated that PapRecT would function in M. smegmatis, where MsSSB is natively expressed. All four RecT's were tested in this species and indeed found that in M. smegmatis PapRecT enabled high efficiency editing, incorporating oligos at the same rate as MspRecT, while the other two RecT variants had much lower efficiency (FIG. 19E).

[0263] Finally, the model for RecT was used to establish recombineering in L. rhamnosus, a well-studied probiotic used to treat a variety of illnesses including diarrhea and bacterial vaginosis. Although the L. rhamnosus SSB and L. lactis SSB only have 47% identity, they share identical SSB C-terminal tail 7 amino acids. It was determined whether LrpRecT (which functions in L. lactis) is portable to L. rhamnosus, while the other RecT proteins would not be functional. The 4 RecT proteins were tested in this species and it was found that LrpRecT incorporated oligonucleotides three orders of magnitude above the background level, while Redβ and PapRecT had negligible activity and MspRecT was toxic.

### Example 13

[0264] In L. lactis, the co-expression of PapRecT and Redβ with compatible SSB's improved genome editing efficiency to a level comparable with the host-compatible LrpRecT. It was determined whether for some species, RecT-SSB pairs could provide functional recombineering capacity even if no functional RecT protein had previously been identified. Therefore, the two best-performing RecT-SSB pairs (Redβ+PaSSB, and PapRecT+PaSSB) were tested for activity in Caulobacter crescentus, a model organism for studying cell cycle regulation, replication, and differentiation.

[0265] In C. crescentus, no significant editing enhancement was detected over the background with the RecT proteins alone, or PapRecT+PaSSB. As compatibility between PapRecT and PaSSB was previously observed, it seemed likely that additional factors must contribute to the incompatibility of this pair with C. crescentus. However, using Redβ+PaSSB, a 15-fold improvement over Redβ alone was observed (FIG. 20A). After expression optimization (FIG. 22) and evasion of mismatch repair, Redβ+PaSSB demonstrated 873-fold improved editing efficiency over the background level, which was 112-fold higher than Redβ alone (FIG. 20B). These results indicate that while RecT-SSB pairs are not universally portable (data not shown), the co-expression of a RecT protein with a compatible bacterial SSB will equal or surpass the editing efficiencies of RecT proteins alone.

### Example 14

[0266] In E. coli, one of the unique capabilities of recombineering is the ability to generate rationally designed or high-coverage genomic libraries. Although this technique (termed MAGE) has been used for a variety of applications including optimizing metabolic pathways, protein evolution, and saturation mutagenesis, it has only been used in a limited capacity in other species. L. lactis, a microbe distantly related to E. coli, was used to demonstrate how mismatch repair evasion and oligonucleotide library design can be used to perform high-coverage genomic mutagenesis after a functional RecT protein has been identified.

[0267] To begin, the assay in L. lactis was adapted to allow the efficient incorporation of single, double, or triple nucleotide mutations, which are normally recognized and corrected by mismatch repair pathways. The cognate pair PapRecT and PaSSB, was used and co-expressed either the dominant negative mismatch repair protein MutL.E32K from E. coli, or the host protein L. lactis MutL carrying the equivalent mutation (L1MutL.E33K, data not shown). While MutL.E32K from E. coli was nonfunctional, co-expression of LlMutL.E33K enabled the efficient introduction of 1 bp pair changes (FIGS. 23A-23E). Optimization of inducer and oligonucleotide concentrations further improved editing efficiency 26-fold (FIGS. 23A-23E).

[0268] Table 3 includes sequences that were used in Examples 10-14.

[0269] See also, e.g., Filsinger et al., bioRxiv 2020.04.14.041095 (doi.org/10.1101/2020.04.14.041095), which is herein incorporated by reference in its entirety.

TABLE 3
Additional sequences

| Gene or | Codon | | |
|---|---|---|---|
| construct | optimized | | SEQ ID |
| name | for: | Sequence | NO: |
| λBeta | L. lactis; | ATGAGTACTGCACTTGCAACATTAGCTGGCAAGTTAGCAGAG | 473 |
| | L. rhamnosus | CGTGTTGGTATGGATTCAGTCGACCCTCAGGAGCTTATAACT | |
| | | ACCTTACGTCAAACAGCGTTCAAGTGTGACGCCTCTGATGCA | |
| | | CAATTTATCGCTTTGCTTATCGTAGCTAACCAGTATGGGTTGA | |
| | | ATCCTTGGACGAAGGAGATATACGCTTTCCCGGATAAGCAGA | |
| | | ACGGTATTGTTCCTGTAGTAGGTGTCGATGGATGGAGTAGAA | |
| | | TTATCAATGAAAATCAACAGTTCGATGGCATGGACTTCGAGC | |
| | | AGGATAATGAATCATGTACCTGCCGTATATATAGAAAAGACC | |
| | | GAAATCACCCAATTTGTGTGACTGAATGGATGGATGAGTGCA | |
| | | GACGTGAGCCGTTCAAGACCCGAGAAGGCCGTGAAATCACTG | |
| | | GTCCGTGGCAATCACATCCAAAGAGAATGTTGCGTCACAAGG | |
| | | CGATGATTCAGTGCGCCCGTTTAGCTTTTGGGTTTGCTGGCAT | |
| | | TTACGACAAGGACGAAGCTGAAAGAATCGTTGAAAACACTG | |
| | | CATATACCGCTGAACGACAACCGGAGCGTGACATTACGCCAG | |
| | | TGAATGACGAGACAATGCAGGAAATTAACACGTTGTTGATTG | |
| | | CTTTGGACAAAACGTGGGACGACGACTTGTTACCACTTTGTA | |
| | | GCCAAATTTTTCGTCGAGACATTAGAGCTTCATCTGAGCTTAC | |
| | | ACAAGCTGAAGCCGTCAAGGCATTGGGGTTTTTGAAACAAAA | |
| | | AGCTACCGAACAGAAGGTAGCGGCATAA | |
| PapRecT | L. lactis; | ATGGGAACCGCCCTTACACCTCTTTTGACAAAGTTCGCAACC | 476 |
| | L. rhamnosus | AGATATGAGATGGGAACGACCCCTGAAGAGGTTGCTAATACA | |
| | | TTGAAACAAACATGCTTCAAGGGACAGGTCAACGACAGTCAA | |
| | | ATGGTAGCCCTTTTGATAGTCGCTGACCAGTACAAGTTAAAC | |
| | | CCGTTCACCAAGGAGTTGTATGCATTCCCTGACAAGAATAAT | |
| | | GGAATCGTGCCAGTTGTTGGTGTCGATGGATGGGCGAGAATA | |
| | | ATAAACGAGAACCCTCAGTTTGATGGTATGGAATTTTCTATG | |
| | | GACCAGCAGGGCACTGAGTGCACGTGCAAAATCTATCGTAAG | |
| | | GATCGTTCTCACGCAATAAGCGCTACGGAATATATGGCCGAA | |
| | | TGTAAGAGAAATACGCAACCTTGGCAAAGTCACCCACGACGT | |
| | | ATGTTAAGACATAAAGCCATGATCCAGTGTGCGCGATTAGCA | |
| | | TTCGGCTTCGCTGGTATCTACGATCAAGACGAAGCGGAACGA | |
| | | ATAGTCGAAAGAGACGTTACTCCGGCGGAGCAGTACGAAGA | |
| | | TGTCAGCGAAGCTATATGCTTGATTAAGGACAGCCCGACGAT | |
| | | GGAGGATTTACAGGCAGCGTTCAGCAATGCCTGGAAGGCGTA | |
| | | TAAAACCAAAGGTGCAAGAGACCAATTGACAGCCGCCAAGG | |
| | | ATCAGCGTAAAAAGGAATTACTTGATGCCCCAATAGATGTCG | |
| | | AGTTCGAAGAAACTGGCGATGATAGAGCAGCATAA | |
| MspRecT | L. lactis; | ATGGCAGAAAACGCCGTGACGAAACAAGACTCACCTAAAGC | 477 |
| | L. rhamnosus | CCCAGAAACGATATCACAGGTCCTTCAAGTGTTAGTACCTCA | |
| | | ATTAGCTCGAGCCGTACCTAAGGGAATGGATCCTGATAGAAT | |
| | | AGCTCGAATCGTCCAGACCGAGATCAGAAAGAGTAGAAATG | |
| | | CGAAAGCGGCGGGAATCGCCAAACAGTCATTGGATGACTGC | |
| | | ACGCAAGAAAGCTTCGCCGGGGCGTTACTTACAAGTGCGGCA | |
| | | TTGGGCCTTGAGCCAGGCGTTAACGGTGAGTGTTATCTTGTTC | |
| | | CATACAGAGACACAAGAAGAGGTGTCGTCGAGTGCCAGTTA | |
| | | ATTATCGGGTATCAAGGAATCGTTAAATTGTTTTGGCAACATC | |
| | | CGCGAGCCTCTCGAATAGACGCCCAGTGGGTGGGGGCAAAC | |
| | | GATGAATTCCATTATACAATGGGTCTTAACCCAACCTTAAAA | |
| | | CATGTAAAGGCTAAGGGAGACCGAGGAAACCCAGTATATTTT | |
| | | TATGCTATCGTAGAGGTCACGGGTGCCGAGCCTTTGTGGGAT | |
| | | GTCTTCACAGCTGATGAGATTAGAGAGTTGAGAAGAGGTAAA | |
| | | GTCGGTTCAAGCGGGGATATTAAGGATCCGCAGAGATGGATG | |
| | | GAGCGAAAGACAGCGTTAAAACAAGTGCTTAAGCTTGCTCCA | |
| | | AAAACTACTCGTTTGGACGCAGCAATACGAGCGGACGATAGA | |
| | | CCGGGAACAGATTTGTCTCAAAGCCAGGCGTTGGCATTACCT | |
| | | AGTACAGTTAAGCCAACAGCAGACTACATAGACGGTGAGATT | |
| | | GCAGAGCCACACGAGGTTGACACTCCGCCTAAAAGCAGTCGA | |
| | | GCACAACGAGCTCAGAGAGCGACTGCCCCAGCCCCAGACGTT | |
| | | CAGATGGCCAATCCGGATCAATTAAAGCGTTTGGGAGAGATT | |
| | | CAAAAAGCCGAAAAGTACAATGATGCCGACTGGTTTAAGTTC | |
| | | TTAGCTGATAGTGCAGGGGTGAAAGCGACAAGAGCAGCTGA | |
| | | TCTTACATTTGATGAAGCAAAAGCTGTAATAGATATGTTCGA | |
| | | CGGCCCAAATGCTTGA | |
| LrpRecT | L. lactis; | ATGGCTAATCAAGTAGCACAACAGCAGAAACCGACTAAGCT | 478 |
| | L. rhamnosus | AACCGATCTTGTATTAGATCGTGTTAAACAAATGCAAGACAC | |
| | | GCAGGACTTGTCACTACCCAAGAATTACAACGCTTCTAATGC | |
| | | GTTGAATGCAGCCTTTCTCGAATTACAAAAAGTACAAGACCG | |
| | | TAATCATCGGCCAGCCTTAGAAGTATGTTCTCATGACTCGATT | |
| | | GTTAAGTCCTTGTTAGATATGACACTGCAAGGGCTATCCCCA | |
| | | GCAAAAGATCAATGCTACTTCATCGTATACGGCAATGAGCTT | |
| | | CAAATGCAACGGAGCTATTTCGGTACTGTTGCAGCAGTTAAG | |
| | | CGACTGGATGGTGTTAAGAAAGTTAGGGCAGAAGTTGTTCAC | |
| | | GAAAAAGATGACTTTGAAATTGGTGCTAATGAAGACATGGAG | |
| | | CTAGTCGTTAAGAGGTTCGTTCCTAAGTTTGAAAATCAAGAT | |
| | | AATCAAATTATTGGAGCTTTTGCCATGATTAAGACTGATGAA | |
| | | GGTACTGACTTTACTGTTATGACTAAGAAAGAGATTGATCAG | |
| | | TCATGGGCACAAACACGTCAAAAAAATAACAAAGTACAGCA | |
| | | GAATTTTAGCCAAGAAATGGCAAAGCGTACTGTGCTTAATCG | |
| | | TGCCGCTAAGATGTTTATTAACACGTCTGATGATAGTGACCTT | |
| | | TTAACTGGTGCTATCAACGATACAACAAGCAACGAATACGAT | |
| | | GATGAGCGTCGAGATGTAACGCCCGTTGAGGATGAAAAACA | |
| | | AAGTACTGATAAATTGCTAGAAGGATTTCAAAAGTCACAAGA | |
| | | AGCGAAGGCTAAGTGGGTAAGTAATGATGGCAACAGCAACG | |
| | | AAGGCAAAGAAACCAGTGAAGAAGTCGCAGACGGACAAACA | |
| | | GAACTCTTCAGCGAAGGGACAATCAAACCAGCCGATGAAGCT | |
| | | GACAGCTAA | |
| λ Beta | E. coli | ATGAGTACTGCACTCGCAACGCTGGCTGGGAAGCTGGCTGAA | 479 |
| | | CGTGTCGGCATGGATTCTGTCGACCCACAGGAACTGATCACC | |
| | | ACTCTTCGCCAGACGGCATTTAAAGGTGATGCCAGCGATGCG | |
| | | CAGTTCATCGCATTACTGATCGTTGCCAACCAGTACGGCCTTA | |
| | | ATCCGTGGACGAAAGAAATTTACGCCTTTCCTGATAAGCAGA | |
| | | ATGGCATCGTTCCGGTGGTGGGCGTTGATGGCTGGTCCCGCA | |
| | | TCATCAATGAAAACCAGCAGTTTGATGGCATGGACTTTGAGC | |
| | | AGGACAATGAATCCTGTACATGCCGGATTTACCGCAAGGACC | |
| | | GTAATCATCCGATCTGCGTTACCGAATGGATGGATGAATGCC | |
| | | GCCGCGAACCATTCAAAACTCGCGAAGGCAGAGAAATCACG | |
| | | GGGCCGTGGCAGTCGCATCCCAAACGGATGTTACGTCATAAA | |
| | | GCCATGATTCAGTGTGCCCGTCTGGCCTTCGGATTTGCTGGTA | |
| | | TCTATGACAAGGATGAAGCCGAGCGCATTGTCGAAAATACTG | |
| | | CATACACTGCAGAACGTCAGCCGGAACGCGACATCACTCCGG | |
| | | TTAACGATGAAACCATGCAGGAGATTAACACTCTGCTGATCG | |
| | | CCCTGGATAAAACATGGGATGACGACTTATTGCCGCTCTGTT | |
| | | CCCAGATATTTCGCCGCGACATTCGTGCATCGTCAGAACTGA | |
| | | CACAGGCCGAAGCAGTAAAAGCTCTTGGATTCCTGAAACAGA | |
| | | AAGCCGCAGAGCAGAAGGTGGCAGCATGA | |
| PapRecT | E. coli | ATGGGTACTGCTCTAACGCCGTTATTAACCAAGTTTGCCACCC | 480 |
| | | GCTATGAGATGGGAACTACCCCCGAAGAGGTCGCTAATACGC | |
| | | TGAAACAGACTTGTTTCAAGGGCCAAGTGAACGATAGTCAGA | |
| | | TGGTAGCCCTTTTGATCGTTGCGGATCAATATAAGCTCAATCC | |
| | | ATTCACAAAAGAGCTCTACGCGTTCCCTGACAAAAATAATGG | |
| | | TATTGTTCCAGTTGTGGGAGTCGATGGTTGGGCTAGAATTATT | |
| | | AACGAGAATCCCCAGTTTGATGGGATGGAATTCAGTATGGAT | |
| | | CAACAGGGAACTGAATGCACTTGTAAAATTTACCGCAAAGAC | |
| | | CGCTCGCACGCCATCAGCGCCACCGAGTACATGGCTGAGTGC | |
| | | AAAAGGAACACTCAACCTTGGCAGTCTCACCCGCGACGTATG | |
| | | CTGCGTCATAAGGCTATGATTCAATGCGCCAGACTAGCCTTT | |
| | | GGTTTCGCGGGGATCTACGATCAGGATGAGGCCGAACGCATT | |
| | | GTTGAACGAGATGTAACTCCCGCCGAGCAATACGAGGATGTA | |
| | | TCCGAAGCGATTTGTCTGATCAAAGACTCACCAACTATGGAG | |
| | | GACTTGCAGGCCGCGTTCTCAAACGCGTGGAAAGCTTACAAG | |
| | | ACTAAAGGTGCCCGTGATCAACTGACTGCTGCTAAAGACCAG | |
| | | AGAAAAAAGGAGCTGTTGGATGCGCCCATTGATGTCGAATTC | |
| | | GAAGAAACTGGAGATGATCGTGCTGCGTAA | |
| MspRecT | E. coli | ATGGCCGAGAATGCCGTCACGAAACAGGATTCCCCTAAGGCA | 481 |
| | | CCGGAAACCATTAGTCAAGTGCTTCAGGTGCTGGTCCCACAA | |
| | | TTGGCTCGTGCAGTACCTAAAGGCATGGATCCTGATCGTATT | |
| | | GCACGTATCGTACAGACGGAGATTCGCAAATCCCGCAACGCA | |
| | | AAAGCCGCTGGAATCGCAAAGCAAAGTTTAGACGATTGCACA | |
| | | CAGGAGTCCTTTGCGGGAGCCTTACTGACCTCAGCGGCTTTA | |
| | | GGGTTAGAGCCAGGCGTCAATGGGGAGTGTTATCTGGTACCC | |
| | | TATCGTGATACACGCCGTGGTGTGGTCGAGTGCCAACTGATT | |
| | | ATTGGATATCAAGGGATTGTCAAACTTTTTTGGCAACATCCGC | |
| | | GCGCGAGCCGCATCGATGCGCAATGGGTTGGCGCGAACGAC | |
| | | GAGTTCCATTATACGATGGGACTTAATCCTACCTTGAAACAT | |
| | | GTAAAGGCAAAAGGTGATCGTGGAAACCCGGTCTACTTTTAC | |
| | | GCCATCGTCGAGGTGACCGGTGCTGAGCCCTTATGGGATGTT | |
| | | TTTACTGCTGATGAAATTCGTGAACTTCGTCGTGGCAAGGTTG | |
| | | GATCGTCTGGAGATATTAAGGACCCCCAGCGTTGGATGGAAC | |
| | | GCAAGACAGCATTGAAACAGGTACTGAAATTGGCTCCCAAAA | |
| | | CCACACGCCTGGATGCGGCGATCCGCGCTGATGATCGTCCAG | |
| | | GGACTGACCTTTCACAGTCGCAGGCTCTGGCCTTACCGTCTAC | |
| | | CGTTAAGCCTACCGCAGACTATATTGATGGGGAGATCGCCGA | |
| | | ACCGCATGAAGTCGATACACCACCAAAGAGTTCACGTGCTCA | |
| | | ACGCGCACAACGTGCCACGGCACCGGCTCCTGATGTGCAAAT | |
| | | GGCCAACCCCGACCAATTGAAGCGTCTGGGGGAGATCCAAA | |
| | | AGGCGGAGAAGTACAATGATGCCGACTGGTTCAAGTTTTTGG | |
| | | CGGACTCCGCCGGTGTGAAAGCGACGCGTGCTGCTGATCTTA | |
| | | CGTTTGATGAAGCAAAGGCTGTAATCGACATGTTTGATGGGC | |
| | | CAAACGCGTGA | |
| LrpRecT | E. coli | ATGGCGAATCAAGTTGCACAGCAACAAAAACCGACAAAATT | 482 |
| | | AACCGATCTGGTTTTGGATAGAGTCAAGCAGATGCAAGACAC | |
| | | CCAGGACCTTAGCCTTCCGAAAAACTATAACGCATCCAATGC | |
| | | ACTGAATGCCGCGTTTTTAGAATTGCAGAAGGTACAAGACCG | |
| | | GAACCACAGACCAGCACTGGAAGTCTGCTCGCACGATTCTAT | |
| | | TGTAAAATCGCTGTTGGACATGACTTTGCAGGGCTTATCCCCT | |
| | | GCGAAGGATCAGTGTTACTTCATAGTATATGGCAATGAGTTA | |
| | | CAGATGCAGAGATCTTATTTCGGGACTGTCGCGGCAGTTAAA | |
| | | AGATTAGATGGGGTGAAGAAGGTCCGGGCGGAAGTCGTGCA | |
| | | TGAAAAGGACGACTTCGAAATTGGCGCCAATGAAGACATGG | |
| | | AGCTGGTAGTGAAACGGTTTGTACCAAAGTTCGAAAATCAAG | |
| | | ACAACCAAATAATAGGGGCGTTCGCAATGATTAAAACGGATG | |
| | | AAGGTACGGACTTCACAGTTATGACGAAAAAGGAAATAGAT | |
| | | CAAAGTTGGGCGCAAACACGCCAGAAGAACAATAAGGTACA | |
| | | GCAGAACTTTAGTCAAGAAATGGCGAAACGTACAGTCCTTAA | |
| | | TCGTGCCGCTAAGATGTTTATAAACACTTCAGACGATTCGGA | |
| | | CTTATTAACCGGGGCCATAAATGACACGACCTCAAACGAGTA | |
| | | TGACGATGAAAGAAGAGATGTGACACCAGTCGAGGACGAAA | |
| | | AACAGAGCACGGATAAATTACTGGAGGGGTTTCAGAAGTCGC | |
| | | AGGAGGCGAAAGCAAAAGGGGTTAGTAACGACGGAAACAGT | |
| | | AATGAGGGAAAAGAGACAAGCGAGGAGGTGGCCGATGGACA | |
| | | GACGGAACTGTTCTCTGAAGGTACTATTAAACCAGCAGATGA | |
| | | AGCGGATAGCTAA | |
| MspRecT | M. | ATGGCAGAAAACGCTGTAACCAAGCAAGACAGTCCCAAAGC | 483 |
| | smegmatis | GCCCGAGACCATATCGCAGGTATTGCAAGTGTTAGTGCCTCA | |
| | | ATTAGCAAGAGCAGTCCCCAAAGGGATGGATCCTGACAGAAT | |
| | | AGCACGCATAGTGCAGACCGAAATACGTAAGTCCCGTAATGC | |
| | | CAAAGCTGCCGGCATCGCAAAACAATCGTTAGATGATTGTAC | |
| | | CCAGGAGAGTTTTGCCGGGGCGCTGCTTACCTCAGCAGCCTT | |
| | | AGGTCTGGAACCAGGAGTTAACGGAGAGTGTTATTTGGTCCC | |
| | | ATACCGGGATACTCGTCGCGGAGTTGTTGAGTGCCAACTTAT | |
| | | TATCGGTTACCAGGGAATAGTGAAGTTGTTCTGGCAACACCC | |
| | | TCGTGCGTCCCGGATTGACGCGCAGTGGGTAGGTGCAAACGA | |
| | | CGAATTCCACTACACTATGGGCCTTAATCCGACACTTAAACA | |
| | | CGTCAAAGCGAAAGGGGATAGAGGAAACCCGGTGTACTTTTA | |
| | | TGCAATTGTTGAGGTTACTGGAGCAGAGCCGTTATGGGATGT | |
| | | CTTTACTGCCGATGAGATACGCGAGCTGCGTCGTGGCAAGGT | |
| | | CGGGAGTTCAGGGGACATTAAAGATCCCCAACGGTGGATGG | |
| | | AGCGGAAGACTGCGCTGAAACAGGTGTTGAAGTTGGCCCCCA | |
| | | AAACGACCCGCCTTGACGCTGCAATCCGGGCGGATGATCGTC | |
| | | CTGGGACTGACCTGTCCCAAAGCCAAGCCTTAGCCCTTCCAA | |
| | | GTACTGTCAAGCCAACCGCAGATTACATTGACGGGGAAATCG | |
| | | CAGAACCGCACGAAGTTGACACTCCTCCGAAGAGTAGCCGCG | |
| | | CACAACGTGCCCAGCGCGCGACGGCACCAGCGCCGGATGTGC | |
| | | AGATGGCAAATCCTGACCAACTTAAAAGACTGGGAGAGATA | |
| | | CAGAAAGCAGAGAAGTACAACGACGCAGATTGGTTTAAGTTT | |
| | | TTGGCGGACAGCGCTGGCGTCAAAGCAACTCGTGCGGCCGAC | |
| | | TTGACCTTTGACGAAGCGAAGGCGGTCATAGATATGTTTGAT | |
| | | GGTCCAAACGCCTGA | |
| PapRecT | M. smegmatis | ATGGGCACCGCCCTGACCCCACTCTTGACCAAGTTTGCCACG | 484 |
| | | CGGTATGAGATGGGCACCACCCCAGAGGAAGTGGCGAACAC | |
| | | CCTCAAGCAGACCTGCTTTAAGGGTCAGGTCAATGATAGCCA | |
| | | GATGGTGGCCTTGCTGATCGTCGCGGACCAATATAAACTGAA | |
| | | TCCATTTACCAAGGAACTCTATGCGTTTCCGGATAAGAACAA | |
| | | TGGTATTGTCCCCGTCGTCGGCGTGGACGGTTGGGCGCGGAT | |
| | | CATTAACGAGAACCCCCAATTCGATGGCATGGAATTTTCGAT | |
| | | GGACCAGCAAGGGACCGAATGCACCTGCAAAATCTACCGGA | |
| | | AAGACCGTAGCCATGCCATTAGCGCCACGGAGTATATGGCCG | |
| | | AATGTAAACGTAATACGCAGCCATGGCAATCCCATCCACGCC | |
| | | GGATGTTGCGCCACAAGGCGATGATCCAGTGTGCGCGGTTGG | |
| | | CCTTTGGTTTCGCGGGCATCTATGACCAGGACGAAGCGGAAC | |
| | | GCATCGTCGAGCGGGATGTGACCCCGGCCGAACAGTATGAGG | |
| | | ACGTGTCGGAGGCGATTTGTCTCATCAAAGATAGCCCAACGA | |
| | | TGGAGGATTTGCAGGCCGCCTTCAGCAACGCCTGGAAGGCGT | |
| | | ACAAGACCAAAGGTGCCCGTGACCAACTGACGGCCGCGAAG | |
| | | GACCAGCGTAAGAAAGAACTGTTGGATGCCCCAATTGATGTC | |
| | | GAATTTGAGGAAACCGGGGACGATCGGGCGGCGTAA | |
| λ Beta | C. crescentus | ATGAGCACGGCGCTCGCGACGCTCGCGGGGAAGCTGGCCGA | 485 |
| | | GCGTGTGGGCATGGATTCGGTCGATCCGCAGGAGCTCATCAC | |
| | | CACGCTCCGGCAGACGGCCTTTAAGTGTGACGCGAGCGATGC | |
| | | CCAGTTTATCGCCCTCCTGATCGTGGCCAATCAGTACGGCCTG | |
| | | AACCCGTGGACGAAGGAAATCTACGCCTTTCCCGACAAGCAA | |
| | | AACGGGATCGTGCCGGTGGTCGGCGTCGATGGGTGGTCCCGT | |
| | | ATCATCAATGAAAATCAGCAATTTGATGGCATGGATTTCGAG | |
| | | CAAGACAATGAATCCTGCACGTGCCGCATCTATCGGAAGGAC | |
| | | CGCAACCATCCGATCTGCGTGACGGAATGGATGGATGAGTGC | |
| | | CGCCGGGAGCCCTTTAAGACGCGGGAGGGCCGGGAAATCAC | |
| | | CGGGCCCTGGCAGTCGCACCCCAAGCGGATGCTCCGTCATAA | |
| | | GGCGATGATCCAATGTGCCCGCCTCGCCTTCGGGTTCGCGGG | |
| | | CATCTACGACAAGGATGAAGCCGAGCGCATCGTGGAAAATA | |
| | | CGGCCTACACGGCGGAGCGTCAGCCGGAACGGGATATCACG | |
| | | CCGGTCAATGACGAAACGATGCAGGAAATCAATACCCTGCTCA | |
| | | TCGCGCTCGACAAGACCTGGGACGATGATCTGCTGCCCCTGTG | |
| | | TAGCCAAATCTTCCGTCGTGATATCCGCGCCTCGTCCGAACTG | |
| | | ACCCAAGCGGAGGCGGTGAAGGCCCTGGGGTTCCTGAAGCA | |
| | | GAAGGCCACCGAGCAAAAGGTCGCGGCCTAA | |
| PapRecT | C. crescentus | ATGGGCACGGCGCTCACGCCGCTGCTCACCAAGTTTGCCACC | 486 |
| | | CGTTACGAGATGGGGACCACCCCCGAAGAAGTGGCGAACAC | |
| | | CCTGAAGCAAACGTGCTTCAAGGGCCAGGTCAACGACTCGCA | |
| | | GATGGTGGCCCTGCTCATCGTGGCCGATCAGTATAAGCTCAA | |
| | | TCCGTTCACCAAGGAACTCTACGCGTTTCCCGATAAGAACAA | |
| | | TGGGATCGTGCCGGTCGTCGGCGTCGACGGCTGGGCGCGTAT | |
| | | CATCAATGAAAATCCGCAGTTCGACGGCATGGAATTCTCGAT | |
| | | GGACCAACAAGGGACCGAATGTACGTGCAAGATCTATCGTAA | |
| | | GGATCGTTCGCACGCGATCAGCGCCACGGAATACATGGCGGAGT | |
| | | GTAAGCGGAATACGCAGCCGTGGCAATCCCACCCCCGCCGTA | |
| | | TGCTGCGCCATAAGGCGATGATCCAATGTGCCCGCCTGGCGT | |
| | | TTGGGTTCGCCGGCATCTACGATCAAGATGAAGCGGAGCGGA | |
| | | TCGTCGAACGCGATGTGACGCCCGCCGAACAATATGAAGACG | |
| | | TGTCGGAAGCGATCTGCCTGATCAAGGACAGCCCCACGATGG | |
| | | AAGATCTCCAAGCGGCCTTTAGCAATGCCTGGAAGGCCTACA | |
| | | AGACGAAGGGGGCGCGTGACCAACTGACGGCGGCCAAGGAT | |
| | | CAACGGAAGAAGGAGCTGCTGGATGCGCCGATCGATGTCGA | |
| | | ATTCGAGGAAACGGGGGACGATCGTGCCGCGTAA | |
| EcSSB | L. lactis | ATGGCAAGCCGTGGGGTTAACAAAGTTATTCTTGTTGGAAACTTA | 487 |
| | | GGACAAGACCCGGAAGTGCGTTATATGCCTAATGGAGGCGCG | |
| | | GTAGCCAATATCACCTTGGCCACAAGCGAGTCTTGGCGAGAC | |
| | | AAAGCAACAGGTGAAATGAAAGAACAAACTGAATGGCACAG | |
| | | AGTAGTTTTGTTTGGAAAATTGGCAGAGGTAGCCTCAGAATA | |
| | | CTTGCGAAAGGGCAGTCAGGTCTATATAGAGGGCCAATTGCG | |
| | | TACCCGTAAGTGGACAGACCAGAGCGGACAAGATCGTTATAC | |
| | | GACCGAGGTCGTTGTTAATGTAGGAGGCACAATGCAGATGTT | |
| | | GGGGGGGAGACAGGGCGGAGGCGCTCCGGCTGGAGGCAATAT | |
| | | CGGGGGTGGCCAACCTCAAGGTGGGTGGGGGCAGCCACAGCAA | |
| | | CCGCAAGGAGGTAATCAATTTAGTGGAGGAGCCCAATCACGT | |
| | | CCGCAGCAGTCTGCGCCTGCCGCCCCTTCTAATGAACCGCCG | |
| | | ATGGATTTTGACGATGATATACCTTTCTGA | |
| PaSSB | L. lactis | ATGGCCCGTGGAGTGAACAAAGTAATTCTTGTCGGTAATGTG | 488 |
| | | GGTGGGGATCCAGAGACGCGATACATGCCAAACGGGAACGCCG | |
| | | TGACAAATATCACCTTAGCCACGAGCGAATCTTGGAAGGACA | |
| | | AACAAACAGGTCAGCAACAAGAACGAACCGAATGGCATAGA | |
| | | GTTGTATTTTTTGGCCGACTTGCTGAGATCGCGGGTGAGTACC | |
| | | TTAGAAAGGGTTCTCAGGTTTATGTCGAGGGCTCATTAAGAA | |
| | | CACGTAAGTGGCAGGGGCAGGACGGGCAAGACCGATATACA | |
| | | ACTGAAATAGTAGTGGACATAAACGGCAACATGCAACTTCTT | |
| | | GGTGGCAGACCGAGTGGGGACGATTCACAGAGAGCTCCAAG | |
| | | AGAACCTATGCAGCGACCACAGCAGGCTCCTCAACAGCAGTC | |
| | | TCGTCCGGCCCCTCAGCAGCAACCGGCTCCGCAACCTGCACAAG | |
| | | ATTACGATAGTTTTGATGATGATATTCCATTCTAA | |
| MsSSB | L. lactis | ATGGCGGGAGACACAACAATTACGGTTGTGGGAAACTTGACA | 489 |
| | | GCCGATCCTGAATTGCGATTCACCCCATCAGGCGCTGCGGTG | |
| | | GCGAATTTCACAGTCGCGAGCACCCCACGAATGTTTGATAGA | |
| | | CAATCAGGCGAATGGAAGGATGGCGAAGCGTTGTTTTTACGA | |
| | | TGCAACATCTGGAGAGAGGCGGCCGAGAACGTCGCCGAAAG | |
| | | CCTTACCCGTGGCAGTCGAGTGATTGTAACCGGACGATTAAA | |
| | | GCAAAGAAGTTTTGAGACGAGAGAAGGAGAGAAACGAACTGT | |
| | | GGTAGAGGTAGAGGTGGATGAAATAGGTCCTAGTTTGCGTTAT | |
| | | GCCACAGCGAAAGTAAACAAAGCCTCTCGTAGTGGTGGCGG | |
| | | GGGGGGCGGCTTTGGTTCAGGGGGTGGAGGTTCACGACAGA | |
| | | GCGAGCCAAAGGATGATCCTTGGGGCAGTGCCCCTGCATCAG | |
| | | GCAGTTTTAGCGGAGCAGATGACGAGCCGCCTTTTTGA | |
| LrSSB | L. lactis | ATGCTTAATCGTGCAGTCTTAACTGGGCGTTTAACAAGAGAT | 490 |
| | | CCCGAGTTGCGGTACACAACCAGCGGGACAGCAGTTGTTTCA | |
| | | TTTACGTTAGCTGTTGATCGGCAATTCCGAAACCAAAATGGT | |
| | | GATCGTGATGCTGATTTTATCAATTGCGTTATTTGGCGTAAAT | |
| | | CCGCTGAAAACTTTAGTAACTTTACGCATAAGGGTTCACTTGT | |
| | | TGGAATTGAAGGGCGTATTCAAACCCGGAATTATGAAAACCA | |
| | | ACAGGGTAACCGTGTGTATGTTACCGAAGTTGTTGTAGATAA | |
| | | TTTTGCATTGTTAGAACCTCGTCAAAATGGTGGCATGAACCA | |
| | | ATCAGGGGTTCAACAACCATTTAACAGCAACCAACAATCATT | |
| | | TGGTGCTCAGGCTCCACAATATGGTAGTCAACCACAACCTGG | |
| | | AAATAATGCTCCTCAAAGTAATCCGTCACCAAGTATGGATAATG | |
| | | GTTTCGATCCCAATCAAAATGCTGGCAACCAGTTCCCTGGAAGC | |
| | | AGTGATGATGGTGGTCAATCCATTGATTTAGCTGATGACGAATTA | |
| | | CCATTCTAA | |
| LlSSB | L. lactis | ATGATTAACAATGTTGTATTAGTGGGACGCATTACTCGCGAT | 491 |
| | | CCTGAACTTCGTTACACCCCTCAAAATCAAGCTGTTGCAACTTTT | |
| | | TCATTGGCTGTAAATCGTCAATTTAAAAATGCTAACGGTGAAC | |
| | | GTGAGGCTGATTTCATTAACTGCGTTATTTGGCGCCAACAAG | |
| | | CTGAAAATTTGGCAAATTGGGCTAAAAAAGGAGCTTTGATCG | |
| | | GTGTAACTGGTCGAATTCAAACACGTAATTATGAAAATCAAC | |
| | | AAGGTCAACGCGTTTATGTGACTGAGGTTGTGGCTGATAGTT | |
| | | TCCAAATGTTGGAAAGTAGATCTGCTCGCGATGGTATGGGAG | |
| | | GCGGAGCTTCTGCCGGTTCATATTCTGCACCAAGCCAATCTAC | |
| | | AAATAATACTCCACGTCCACAAACGAATAATAATAGTGCAAC | |
| | | ACCGAATTTCGGTCGTGATGCTGACCCATTTGGTAGCTCACCT | |
| | | ATGGAAATCTCGGATGATGATCTTCCATTCTAA | |
| PapSSB | L. lactis | ATGCGTGGGGTTAATAAGGTAATCTTAGTTGGTAACGTGGGT | 492 |
| | | GGGGACCCGGAGACCCGATATATGCCAAATGGAAACGCGGT | |
| | | AACAAACATCACCCTTGCAACTAGTGAGAGTTGGAAAGATAA | |
| | | ACAAACTGGCCAACAGCAAGAACGTACTGAATGGCACAGAGTG | |
| | | GTGTTTTTTGGCAAATTAGCCGAAATTGTCGGCCAACACGTTAA | |
| | | GAAAGGCCAGCAGCTTTACGTCGAAGGGTCATTGCGAACCCG | |
| | | TAAGTGGCAAGCGCAGGATGGTCAGGACAGATATACGACAG | |
| | | AAATCATAGTAGATATGCACGGACAAATGCAAATGTTCGGGG | |
| | | GAAAACCTGGGAATGAGCAGGCCGCACAGTCAAGATCATCT | |
| | | ACCCAACAACAAAGCGCCCCGCAACAACGATCAGCACAGGA | |
| | | TGAATTTGATGATGATATACCTTTATAA | |
| EcSSB | E. coli | ATGGCCAGCAGAGGCGTAAACAAGGTTATTCTCGTTGGTAAT | 493 |
| | | CTGGGTCAGGACCCGGAAGTACGCTACATGCCAAATGGTGGC | |
| | | GCAGTTGCCAACATTACGCTGGCTACTTCCGAATCCTGGCGTGA | |
| | | TAAAGCGACCGGCGAGATGAAAGAACAGACTGAATGGCACCG | |
| | | CGTTGTGCTGTTCGGCAAACTGGCAGAAGTGGCGAGCGAATA | |
| | | TCTGCGTAAAGGTTCTCAGGTTTATATCGAAGGTCAGCTGCGT | |
| | | ACCCGTAAATGGACCGATCAATCCGGTCAGGATCGCTACACC | |
| | | ACAGAAGTCGTGGTGAACGTTGGCGGCACCATGCAGATGCTG | |
| | | GGTGGTCGTCAGGGTGGTGGCGCTCCGGCAGGTGGCAATATC | |
| | | GGTGGTGGTCAGCCGCAGGGCGGTTGGGGTCAGCCTCAGCAG | |
| | | CCGCAGGGTGGCAATCAGTTCAGCGGCGGCGCGCAGTCTCGC | |
| | | CCGCAGCAGTCCGCTCCGGCAGCGCCGTCTAACGAGCCGCCG | |
| | | ATGGACTTTGATGATGACATTCCGTTCTGA | |
| PaSSB | E. coli | ATGGCTCGCGGGGTAAATAAGGTCATTTTGGTTGGCAATGTT | 494 |
| | | GGTGGTGATCCCGAGACACGCTATATGCCTAACGGGAACGCC | |
| | | GTCACTAATATCACACTGGCAACGTCCGAGTCATGGAAGGAT | |
| | | AAACAGACAGGTCAACAGCAAGAACGCACGGAGTGGCACCG | |
| | | CGTGGTATTTTTCGGGCGTCTTGCTGAGATCGCCGGAGAGTAT | |
| | | TTACGCAAAGGATCGCAGGTATACGTTGAGGGTTCTTTACGC | |
| | | ACGCGCAAGTGGCAGGGTCAGGATGGTCAGGACCGTTATACT | |
| | | ACCGAAATTGTAGTCGACATTAACGGGAACATGCAATTATTA | |
| | | GGTGGTCGTCCGAGCGGAGATGACTCCCAGCGCGCCCCCCGC | |
| | | GAGCCCATGCAGCGTCCGCAACAGGCTCCACAGCAGCAGAG | |
| | | CCGCCCTGCCCCTCAACAACAACCCGCTCCTCAACCCGCGCA | |
| | | AGATTACGATTCGTTTGACGACGATATTCCTTTTTAA | |
| MsSSB | E. coli | ATGGCAGGGGATACCACGATAACCGTTGTCGGTAACTTAACC | 495 |
| | | GCGGACCCTGAACTTCGTTTCACACCATCCGGTGCAGCGGTT | |
| | | GCAAACTTCACGGTCGCTTCTACGCCTCGTATGTTCGACAGAC | |
| | | AGTCTGGTGAGTGGAAAGATGGGGAAGCACTGTTTTTAAGAT | |
| | | GCAATATATGGCGCGAAGCAGCAGAGAATGTAGCCGAGAGTT | |
| | | TAACCAGAGGTTCACGTGTGATCGTAACTGGCCGTTTGAAACA | |
| | | ACGCTCCTTTGAAACACGCGAAGGCGAGAAACGCACGGTAGTT | |
| | | GAGGTCGAAGTCGACGAGATAGGCCCGTCCTTACGCTATGCC | |
| | | ACAGCGAAAGTCAACAAAGCGTCTCGCAGCGGAGGCGGTGG | |
| | | GGGCGGGTTTGGTAGTGGTGGGGGGGGTAGTCGTCAATCGGA | |
| | | ACCCAAGGATGACCCGTGGGGGTCGGCACCAGCTTCAGGAA | |
| | | GTTTTTCTGGGGCCGATGACGAGCCGCCATTTTGA | |
| LrSSB | E. coli | ATGCTGAACCGTGCCGTGCTTACTGGTCGCCTTACTCGTGACC | 496 |
| | | CTGAATTGCGCTATACGACATCAGGGACTGCAGTAGTGTCCT | |
| | | TTACATTGGCGGTCGATCGTCAATTTCGTAACCAAAACGGCG | |
| | | ACCGCGACGCCGATTTTATCAACTGTGTGATTTGGAGAAAGA | |
| | | GCGCCGAGAACTTTAGCAATTTCACTCATAAAGGGAGTTTAG | |
| | | TTGGAATCGAGGGGCGTATCCAAACGAGAAACTACGAAAACC | |
| | | AGCAAGGCAATCGCGTCTACGTAACCGAAGTCGTAGTAGATA | |
| | | ACTTCGCCCTGTTGGAACCACGGCAAAACGGTGGGATGAACC | |
| | | AATCTGGAGTTCAACAACCCTTCAACAGTAACCAGCAGTCTT | |
| | | TCGGGGCTCAGGCACCTCAATATGGCAGTCAGCCACAACCTG | |
| | | GAAACAATGCCCCACAGTCTAACCCAAGTCCCTCTATGGACAAT | |
| | | GGGTTTGACCCCAACCAGAATGCGGGGAACCAATTCCCTGGG | |
| | | AGCTCGGATGACGGCGGCCAATCAATTGATCTGGCTGACGATGA | |
| | | ATTACCCTTTTAA | |
| PaSSB | M. | ATGGCGCGTGGGGTGAACAAAGTCATCCTCGTGGGGAATGTC | 497 |
| | smegmatis | GGTGGCGATCCCGAAACGCGTTATATGCCGAATGGGAATGCG | |
| | | GTCACCAATATCACGCTCGCCACCAGCGAGTCCTGGAAAGAT | |
| | | AAACAAACGGGTCAACAGCAGGAGCGTACGGAGTGGCATCG | |
| | | GGTGGTCTTCTTCGGGCGCCTCGCCGAGATCGCCGGGGAATA | |
| | | CCTCCGTAAAGGTTCGCAGGTCTATGTGGAGGGCTCGCTGCG | |
| | | GACCCGTAAATGGCAAGGTCAGGATGGCCAGGATCGGTACA | |
| | | CGACGGAAATCGTCGTGGACATTAACGGTAATATGCAATTGC | |
| | | TCGGTGGCCGCCCCTCCGGCGATGATAGCCAGCGTGCCCCGC | |
| | | GTGAACCGATGCAACGCCCGCAACAAGCGCCCCAACAGCAA | |
| | | TCGCGGCCCGCGCCGCAGCAGCAGCCGGCCCCGCAACCAGCC | |
| | | CAGGACTACGATTCGTTTGATGATGACATTCCATTTTAA | |
| PaSSB | C. | ATGGCGCGTGGGGTCAATAAGGTGATCCTGGTCGGCAACGTG | 498 |
| | crescentus | GGGGGCGATCCCGAAACCCGGTACATGCCGAACGGCAACGC | |
| | | GGTCACCAACATCACCCTGGCGACCAGCGAGAGCTGGAAGG | |
| | | ATAAGCAAACGGGCCAGCAGCAAGAACGTACGGAATGGCAT | |
| | | CGTGTGGTCTTTTTCGGCCGGCTGGCGGAGATCGCGGGGGAA | |
| | | TACCTCCGTAAGGGGTCCCAAGTCTACGTGGAGGGCTCGCTG | |
| | | CGGACCCGGAAGTGGCAAGGGCAAGATGGGCAAGATCGCTA | |
| | | CACCACGGAGATCGTCGTCGACATCAACGGGAACATGCAGCT | |
| | | CCTCGGGGGGCGTCCCTCGGGGGACGATTCCCAACGCGCCCC | |
| | | CCGTGAGCCCATGCAACGCCCGCAGCAAGCGCCCCAGCAACA | |
| | | ATCGCGTCCCGCCCCCCAGCAACAGCCGGCGCCCCAACCGGC | |
| | | GCAGGACTACGACTCGTTCGACGATGATATCCCCTTTTAA | |
| PapExo | L. lactis | ATGATAGAACAGCGTAGTGATGAATGGTTCGCGCAGCGACTT | 499 |
| | | GGCCGAGTCACCGCGAGTAAAGTAAAGGATGTCATGGCGAA | |
| | | GGGGCGATCAGGTGCGCCATCAGCCACCAGACAGAATTACATG | |
| | | ATGCAATTGTTATGTGAGAGACTTACCGGGAAACGAGAAGAGGG | |
| | | GTTCACGAGTGCGGCGATGCAGCGTGGGACGGACCTTGAACC | |
| | | AATAGCGCGATCAGCTTATGAGTTTAACGCAGGAGTAATGAC | |
| | | TATAGAAACAGGCCTTATTATCCATCCACGTATCGACGGTTTCG | |
| | | GAGCTAGTCCGGATGGGCTTGCGGGAGAGCATGGATTAGTGGA | |
| | | AATTAAGTGCCCGTCAACAGCAACGCACATTTATACCATGCA | |
| | | AAGTGGTAAGCACGACCCTCAGTACGAATGGCAAATGCTTGC | |
| | | TCAAATGAGTTGCTCAGGCAGAGAGTGGGTGGATTTCGTGTCAT | |
| | | TCGACGATAGATTGCCAGACGAATTGCAATATGTTTGTTTCCG | |
| | | TTATCACCGTGATGAAGAGAGAATAAGAGAAATGGAAAGCG | |
| | | AAGTTAAGGCATTCTTGGAGGAATTAGCTGAATTGGAACACC | |
| | | AAATGCGTGAACGTATGAGAAAGGCGGCCTAA | |
| LrpExo | L. lactis | ATGAAACTTACGGCCAACAATTACTATAGCCATGAGACTGAC | 500 |
| | | TGGCAATATATGTCAGTTTCATTGTTCAAAGACTTCGAAAAGT | |
| | | GCGAAGCGCGTGCATTAGCAAAGTTGAAGGAAGATTGGCAA | |
| | | CCTGTTTCTAGTCCAGTTCCGCTTTTGGTTGGGAACTATGTAC | |
| | | ACAGTTATTTCGAAAGTGCTAAGAGCCACCAAGATTTTATAG | |
| | | AGGCGAATAAGAAAGAGCTTATGACCAGACCTACTAAGACA | |
| | | AACCCGAACGGCCATCTTAGAGCGGAATTTAAGGGGGCAAAC | |
| | | TCAATGATTCAGACCTTGCAAGCCGACGATATGTTTAACTACT | |
| | | TTTATGCACCAGGGGACAAAGAAGTTATCGTTACCGGAGAGA | |
| | | TAGACGGCTATTTGTGGAAGGGAAAAATAGACTCTTTAGTTC | |
| | | TTGACAAAGGCTATTTTTGCGATCTTAAGACGGTAGACGACA | |
| | | TTCATAAGGGACATTGGAATACGTATGAACACAGATACGTCC | |
| | | CGTTCATTCAAGACCGAGAATATGATTTACAAATGGCTGTTT | |
| | | ATAGAGAGTTAATCAAGCAGACGTTCGGGAAAAAGTGCCAA | |
| | | CCTTTAATTTTTGCCATCTCTAAGCAAACTCCGCCTGACAAGAT | |
| | | GGCCATCGACTTTAATGGCGTTGATGACGACTATCAGATGCAG | |
| | | GCCGATCTTGATAAGGTCAAAGAGCTTCAACCACACTTTTGG | |
| | | AAAGTAATGACGGGAGAGGAAGAGCCTGTCCACTGTGGTAA | |
| | | GTGCGACTATTGTAGAGAAACGAAAATGTTGAGCGGCTTCAT | |
| | | CCACGCATCAGAAATAGAGGTTTAA | |
| mCardinal | | ATGCACCATCATCACCACCACGGTTCCGGCATGGTTTCTAAA | 501 |
| RBS eGFP | | GGTGAAGAACTGATCAAGGAAAACATGCACATGAAGCTGTA | |
| | | TATGGAAGGTACCGTTAACAACCACCATTTCAAATGCACCAC | |
| | | TGAAGGTGAAGGTAAACCGTACGAGGGTACGCAGACCCAAC | |
| | | GTATTAAAGTTGTTGAGGGTGGTCCGCTGCCGTTCGCGTTCGA | |
| | | CATCCTGGCGACCTGTTTCATGTACGGCTCTAAAACCTTCATC | |
| | | AACCACACCCAGGGTATCCCTGACTTCTTCAAACAGTCTTTCC | |
| | | CGGAGGGTTTCACCTGGGAACGTGTTACCACCTACGAAGACG | |
| | | GTGGTGTACTGACCGTTACCCAGGACACTTCTCTGCAGGACG | |
| | | GTTGCCTGATCTACAACGTTAAACTCCGCGGTGTTAATTTCCC | |
| | | GTCTAACGGTCCGGTTATGCAAAAAAAGACGCTGGGTTGGGA | |
| | | AGCGACTACGGAAACTCTCTACCCTGCCGATGGCGGCCTCGA | |
| | | AGGTCGTTGTGATATGGCGCTGAAACTGGTTGGTGGCGGTCA | |
| | | CCTGCACTGCAATCTGAAAACTACCTACCGTTCTAAAAAACC | |
| | | AGCTAAAAACCTCAAAATGCCGGGTGTTTACTTTGTTGATCGT | |
| | | CGTCTGGAACGTATCAAAGAAGCAGACAACGAAACTTACGTT | |
| | | GAACAGCACGAAGTTGCGGTGGCGCGTTACTGCGACCTGCCA | |
| | | TCTAAACTGGGTCACAAAGGTATGGACGAACTGTACAAATAA | |
| | | AAAAAATAGGAGGAAAAACATATGGGTTCTCACCACCATCAC | |
| | | CACCACAGCGGCTCTAAAGGTGAAGAATTATTCACTGGTGTT | |
| | | GTCCCAATTTTGGTTGAATTAGATGGTGATGTTAATGGTCACA | |
| | | AATTTTCTGTCTCCGGTGAAGGTGAAGGTGATGCTACGTACG | |
| | | GTAAATTGACCTTAAAATTTATTTGTACTACTGGTAAATTGCC | |
| | | AGTTCCATGGCCAACCTTAGTCACTACTTTCACTTATGGTGTT | |
| | | CAATGTTTTTCTAGATACCCAGATCATATGAAACAACATGAC | |
| | | TTTTTCAAGTCTGCCATGCCAGAAGGTTATGTTCAAGAAAGA | |
| | | ACTATTTTTTTCAAAGATGACGGTAACTACAAGACCAGAGCT | |
| | | GAAGTCAAGTTTGAAGGTGATACCTTAGTTAATAGAATCGAA | |
| | | TTAAAAGGTATTGATTTTAAAGAAGATGGTAACATTTTAGGT | |
| | | CACAAATTGGAATACAACTATAACTCTCACAATGTTTACATC | |
| | | ATGGCTGACAAACAAAAGAATGGTATCAAAGTTAACTTCAAA | |
| | | ATTAGACACAACATTGAAGATGGTTCTGTTCAATTAGCTGAC | |
| | | CATTATCAACAAAATACTCCAATTGGTGATGGTCCAGTCTTGT | |
| | | TACCAGACAACCATTACTTATCCACTCAATCTGCCTTATCCAA | |
| | | AGATCCAAACGAAAAGAGAGACCACATGGTCTTGTTAGAATT | |
| | | TGTTACTGCTGCTGGTATTACCCATGGTATGGATGAATTGTAC | |
| | | AAATAA | |
| E. coli MutL | L. lactis | ATGCCTATACAAGTGTTGCCTCCACAGTTGGCCAACCAAATC | 502 |
| E32K | | GCGGCAGGCGAGGTGGTCGAACGTCCGGCTTCAGTCGTTAAG | |
| | | GAATTGGTAAAAAATTCTTTGGATGCAGGGGCAACGAGAATT | |
| | | GATATTGACATCGAACGAGGCGGGGCCAAGTTAATCAGAATC | |
| | | CGAGACAATGGGTGTGGGATTAAAAAGGATGAACTTGCTTTG | |
| | | GCGTTGGCACGTCACGCGACCAGCAAAATAGCGTCTCTTGAC | |
| | | GACTTGGAAGCTATTATCAGTCTTGGTTTCCGTGGGGAAGCCT | |
| | | TAGCATCTATTAGCTCTGTGTCACGTTTGACTTTGACTAGCAG | |
| | | AACGGCGGAACAGCAGGAAGCATGGCAAGCGTATGCGGAAG | |
| | | GACGAGACATGAACGTCACGGTTAAGCCGGCAGCCCACCCG | |
| | | GTCGGCACGACCTTGGAGGTCTTGGACTTGTTCTATAATACCC | |
| | | CTGCACGTCGTAAATTCTTACGAACCGAAAAGACCGAATTTA | |
| | | ACCATATAGATGAGATAATAAGAAGAATTGCGTTAGCACGTT | |
| | | TCGATGTTACTATAAATTTGAGTCATAACGGAAAAATCGTTA | |
| | | GACAGTATCGAGCCGTGCCTGAGGGCGGGCAGAAGGAAAGA | |
| | | AGATTAGGGGCTATTTGTGGCACTGCTTTTCTTGAACAAGCAC | |
| | | TTGCGATCGAATGGCAACATGGGGACCTTACCTTGCGAGGTT | |
| | | GGGTAGCGGACCCGAATCATACAACACCAGCGTTGGCAGAG | |
| | | ATACAATATTGCTATGTAAACGGACGAATGATGAGAGATCGT | |
| | | TTGATCAACCACGCAATACGACAGGCTTGCGAAGATAAGTTG | |
| | | GGGGCGGATCAACAGCCAGCTTTCGTCCTTTATCTTGAAATTG | |
| | | ACCCTCATCAGGTAGATGTGAATGTACATCCGGCCAAACACG | |
| | | AGGTTCGTTTTCATCAAAGTCGACTTGTGCATGATTTTATATA | |
| | | CCAGGGTGTCTTAAGTGTCTTGCAGCAGCAGCTTGAGACACC | |
| | | TTTACCTTTAGATGATGAGCCGCAGCCAGCTCCGCGTAGTATC | |
| | | CCTGAGAATCGAGTTGCCGCCGGCAGAAATCATTTCGCAGAA | |
| | | CCGGCAGCCCGTGAACCTGTAGCACCGAGATACACCCCGGCT | |
| | | CCTGCCTCTGGATCACGTCCTGCTGCCCCGTGGCCTAACGCAC | |
| | | AACCGGGCTATCAGAAGCAGCAGGGTGAAGTTTATCGTCAAT | |
| | | TGTTACAAACTCCGGCACCAATGCAAAAACTTAAGGCCCCGG | |
| | | AGCCGCAGGAACCGGCGCTTGCTGCAAATTCACAATCTTTCG | |
| | | GACGAGTTTTAACAATAGTGCATAGTGACTGCGCATTACTTG | |
| | | AGCGTGACGGCAACATTAGTTTGCTTTCATTGCCTGTTGCCGA | |
| | | GCGTTGGTTGAGACAAGCACAATTAACCCCTGGTGAAGCACC | |
| | | AGTCTGTGCACAGCCATTATTGATCCCATTGCGTTTAAAGGTC | |
| | | TCAGCCGAGGAAAAGAGTGCTTTGGAAAAAGCCCAAAGTGC | |
| | | CCTTGCAGAGCTTGGAATTGATTTCCAAAGCGACGCACAACA | |
| | | CGTTACGATAAGAGCGGTTCCATTACCGTTAAGACAGCAAAA | |
| | | CTTACAAATTCTTATACCAGAGCTTATCGGGTATTTGGCGAAA | |
| | | CAGAGCGTATTCGAACCAGGTAATATCGCCCAGTGGATAGCG | |
| | | CGTAACCTTATGTCAGAACACGCGCAGTGGAGTATGGCGCAA | |
| | | GCTATCACATTGTTAGCCGACGTTGAGCGTTTGTGCCCACAGT | |
| | | TGGTGAAAACGCCTCCGGGTGGACTTCTTCAAAGTGTGGACT | |
| | | TACATCCAGCAATTAAGGCTCTTAAAGATGAATAA | |
| L. lactis MutL | L. lactis | GTGGGAAAAATTATTGAACTAAATGAAGCGCTCGCCAATCAA | 503 |
| E33K | | ATTGCTGCTGGAGAGGTGGTTGAGCGGCCTGCTAGTGTTGTC | |
| | | AAAGAATTAGTCAAAAACTCAATTGATGCTGGAAGCAGTAAA | |
| | | ATTATTATCAATGTTGAAGAAGCAGGTTTGCGATTAATTGAA | |
| | | GTCATTGATAATGGTTTGGGCTTAGAAAAAGAAGATGTGGCT | |
| | | TTGGCTTTGCGTCGTCATGCGACAAGTAAAATCAAAGATTCA | |
| | | GCTGATTTATTTCGAATTAGAACGCTCGGTTTTCGGGGTGAGG | |
| | | CTCTGCCGTCAATCGCTTCTGTCAGTCAGATGACGATTGAAAC | |
| | | AAGTAATGCTCAGGAAGAAGCTGGGACAAAACTGATTGCTA | |
| | | AAGGTGGGACGATTGAAACTTTAGAACCTCTTGCAAAGCGGT | |
| | | TAGGGACAAAAATTTCTGTTGCGAATCTTTTTTATAATACACC | |
| | | AGCAAGGCTCAAGTATATCAAGTCTTTACAGGCTGAACTTTC | |
| | | TCATATTACAGATATTATCAATCGTTTGAGCCTCGCTCATCCA | |
| | | GAGATTTCTTTTACTTTAGTTAATGAGGGTAAAGAATTTTTGA | |
| | | AAACGGCGGGAAATGGAGACTTGCGCCAAGTGATTGCTGCA | |
| | | ATTTATGGCATTGGAACGGCGAAAAAAATGCGTGAGATTAAT | |
| | | GGCTCGGACTTAGATTTTGAACTGACAGGTTATGTCAGTTTAC | |
| | | CCGAGCTGACAAGAGCGAATCGCAACTATATCACGATTTTGA | |
| | | TTAATGGTCGATTTATCAAGAATTTTTTGTTGAATCGAGCAAT | |
| | | TTTAGAAGGTTACGGGAACCGATTGATGGTTGGACGTTTTCCT | |
| | | TTTGCTGTTTTATCAATTAAAATTGACCCTAAATTAGCAGATG | |
| | | TCAATGTCCATCCGACAAAACAAGAAGTACGTTTGTCTAAGG | |
| | | AACGTGAATTGATGACTTTAATTTCTAAAGCGATTGATGAGA | |
| | | CCTTATCAGAAGGGGTTTTGATTCCAGAAGCTTTGGAAAATTT | |
| | | GCAAGGTAGAGCCAAGGAAAAGGGGACTGTTTCTGTTCAAAC | |
| | | GGAACTTCCTTTACAGAATAATCCTTTATACTATGACAATGTT | |
| | | CGTCAAGATTTTTTTGTCAGAGAAGAAGCGATTTTTGAAATC | |
| | | AATAAAAACGATAATTCAGATTCTCTGACTGAACAAAATTCT | |
| | | ACTGATTATACAGTTAATCAGCCAGAAACTGGTTCTGTCAGT | |
| | | GAAAAAATTACGGACAGAACTGTCGAAAGTTCAAATGAATTT | |
| | | ACTGACAGAACCCCAAAAAATTCTGTCAGTAACTTTGGAGTT | |
| | | GATTTTGATAATATTGAGAAGCTGAGTCAGCAATCAACTTTTC | |
| | | CCCAACTAGAATACTTGGCACAATTGCATGCGACTTATTTACT | |
| | | TTGTCAGTCAAAAGAGGGTCTTTATTTGGTTGACCAACATGC | |
| | | GGCTCAGGAGCGAATCAAGTATGAATATTGGAAAGATAAAA | |
| | | TCGGCGAAGTGAGCATGGAGCAACAAATTTTACTTGCGCCAT | |
| | | ATTTATTTACTTTACCCAAAAATGATTTTATTGTTTTAGCTGA | |
| | | GAAAAAGGATTTATTACATGAAGCAGGGGTTTTCTTGGAAGA | |
| | | ATACGGAGAAAATCAATTCATATTAAGAGAGCATCCGATTTG | |
| | | GTTAAAAGAAACTGAGATAGAGAAATCAATTAATGAAATGA | |
| | | TTGATATTATTCTCTCATCAAAAGAATTTTCACTCAAAAAATA | |
| | | TCGGCATGATTTAGCCGCAATGGTTGCTTGTAAAAGCTCAAT | |
| | | CAAAGCCAACCATCCCCTTGATGCCGAGTCTGCTAGAGCTTT | |
| | | GCTTAGAGAATTATCAACTTGTAAAAATCCTTATAGTTGTGCG | |
| | | CATGGACGGCCAACGATTGTCCATTTTTCAGGAGATGACATT | |
| | | CAAAAAATGTTCCGCAGAATTCAAGAAACGCATCGTTCAAAA | |
| | | GCGGCCTCTTGGAAAGATTTTGAGTAA | |
| L. lactis | | ATGATTGAACTTAGTGGCAAAGATAGAAAGTATTTGTATAAA | 504 |
| dsDNA | | CTAGTAAAATCCAAAAAACTAAATTATGAACAAGGTAATTTA | |
| template | | TCGCATCAAGTTTTAATTGAAAACAAGTTAGCAAAAGTTTAC | |
| (Erythromycin | | TTTACAAGCGATAAATATGATCCTGACTTAGGGGAACACATA | |
| resistance | | AATCCACAAAATATTATTGCTCCAACTAGTACAGGTTTAAGA | |
| gene) | | TATAAAAATATTTATCGTGAACAATTATGGGAAAAATATTTT | |
| Homology | | ACTCCTATTTGGGTATCTACGGCAACAACGACTCTAATATGGT | |
| arm, promoter, | | TAGCAAAATATTTACTAGAGAACTTGCTGTAACGCTAAGTAA | |
| gene, | | GATTACTATCCATAGCTCTTTTTTATCTTTTCTCATCTTTCCAC | |
| terminator, | | CTCCTAGCCCACTCGGGCTTTTTAATTTAAAAATTGTTTAATC | |
| homology arm | | TCATGAAACGCCATGCCTATTTCTAACAGTAAGATAATGCTG | |
| | | TCAGTATAGCGCCTAAGCGTTTCTTTTTGTTCTGATTTTTTAAT | |
| | | GTGGTCTTTATTCTTCAACTAAAGCACCCATTAGTTCAACAAA | |
| | | CGAAAATTGGATAAAGTGGGATATTTTTAAAATATATATTTA | |
| | | TGTTACAGTAATATTGACTTTTAAAAAAGGATTGATTCTAATG | |
| | | AAGAAAGCAGACAAGTAAGCCTCCTAAATTCACTTTAGATAA | |
| | | AAATTTAGGAGGCATATCAAATGAACAAAAATATAAAATATT | |
| | | CTCAAAACTTTTTAACGAGTGAAAAAGTACTCAACCAAATAA | |
| | | TAAAACAATTGAATTTAAAAGAAACCGATACCGTTTACGAAA | |
| | | TTGGAACAGGTAAAGGGCATTTAACGACGAAACTGGCTAAA | |
| | | ATAAGTAAACAGGTAACGTCTATTGAATTAGACAGTCATCTA | |
| | | TTCAACTTATCGTCAGAAAAATTAAAACTGAATACTCGTGTC | |
| | | ACTTTAATTCACCAAGATATTCTACAGTTTCAATTCCCTAACA | |
| | | AACAGAGGTATAAAATTGTTGGGAGTATTCCTTACCATTTAA | |
| | | GCACACAAATTATTAAAAAAGTGGTTTTTGAAAGCCATGCGT | |
| | | CTGACATCTATCTGATTGTTGAAGAAGGATTCTACAAGCGTA | |
| | | CCTTGGATATTCACCGAACACTAGGGTTGCTCTTGCACACTCA | |
| | | AGTCTCGATTCAGCAATTGCTTAAGCTGCCAGCGGAATGCTTT | |
| | | CATCCTAAACCAAAAGTAAACAGTGTCTTAATAAAACTTACC | |
| | | CGCCATACCACAGATGTTCCAGATAAATATTGGAAGCTATAT | |
| | | ACGTACTTTGTTTCAAAATGGGTCAATCGAGAATATCGTCAA | |
| | | CTGTTTACTAAAAATCAGTTTCATCAAGCAATGAAACACGCC | |
| | | AAAGTAAACAATTTAAGTACCGTTACTTATGAGCAAGTATTG | |
| | | TCTATTTTTAATAGTTATCTATTATTTAACGGGAGGAAATAAT | |
| | | AATATGAGATAATGCCGACTGTACTTTTTACAGTCGGTTTTCT | |
| | | AATGTCACTAACCTGCCCCGTTAGTTGAAGAAGGTTTTTATAT | |
| | | TACAGCTCCACGGTTAAATTTGTCGCCTGACTGTTTAAAGCTC | |
| | | GTTAGACTACGATATTTTCCGCTTGTCGTAAGTTGTACAAGTA | |
| | | AATCAAGAATGATTTTGTGATAGTACGGTTTAGACTGCCTGCT | |
| | | TTGCATGATTGCGGTGTCTAGTTTGTTCATGGTTAGTTATCCT | |
| | | TAACTTGCAAAAAAATCAAGTTAATAGTTAAAATTTTTCATC | |
| | | AAGTCATAAATAGAATTTTCTTCTAAATTTGCTGCTCTTTCTA | |
| | | ATTCTTTAACCTTATCAAGTGTTAATTTATTCGGAGCTAATCT | |
| | | AATGCGATATAGAGCATTATATGTGATTCCCATATTCTTCGCT | |
| | | ATCGCCTCATATCTTACCCCTGATTGTTTTAAAATCTCATCAA | |
| | | GTGGTTTATAAGTTTTACTCATTTTATCTCCTTTCTGATTTTTA | |
| | | TGTTTTTCATTCTAACATTAACTTGATTTTTATGCAAGTAATA | |
| | | ACTTTACTTTTTTGCAAGTTTTCTCTTGAAAGTAGTT | |
| RBS | | TTTTGGGGAGACGACCAT | 505 |
| RBS Mod | | AAAAGGAGGTTTTTT | 506 |
| RBS 2 | | AAAAAATAGGAGGAAAAACAT | 507 |
| RBS 2 Mod | | AAAAAAAAAAGGAGGTTTTTT | 508 |
| RBS 1 | | AAAAATAAGGTGGAAAAACAT | 509 |
| RBS 3 | | AAAAATAAGGAGGTAAAACAT | 510 |
| RBS 4 | | AGCTATTCATAAGGAGGTTTAGATT | 511 |
| L. Lactis MutL | | MGKIIELNEALANQIAAGEVVERPASVVKELVENSIDAGSSKIIIN | 512 |
| | | VEEAGLRLIEVIDNGLGLEKEDVALALRRHATSKIKDSADLFRIR | |
| | | TLGFRGEALPSIASVSQMTIETSNAQEEAGTKLIAKGGTIETLEPL | |
| | | AKRLGTKISVANLFYNTPARLKYIKSLQAELSHITDIINRLSLAHP | |
| | | EISFTLVNEGKEFLKTAGNGDLRQVIAAIYGIGTAKKMREINGSD | |
| | | LDFELTGYVSLPELTRANRNYITILINGRFIKNFLLNRAILEGYGN | |
| | | RLMVGRFPFAVLSIKIDPKLADVNVHPTKQEVRLSKERELMTLIS | |
| | | KAIDETLSEGVLIPEALENLQGRAKEKGTVSVQTELPLQNNPLYY | |
| | | DNVRQDFFVREEAIFEINKNDNSDSLTEQNSTDYTVNQPETGSVS | |
| | | EKITDRTVESSNEFTDRTPKNSVSNFGVDFDNIEKLSQQSTFPQLE | |
| | | YLAQLHATYLLCQSKEGLYLVDQHAAQERIKYEYWKDKIGEVS | |
| | | MEQQILLAPYLFTLPKNDFIVLAEKKDLLHEAGVFLEEYGENQFI | |
| | | LREHPIWLKETEIEKSINEMIDIILSSKEFSLKKYRHDLAAMVACK | |
| | | SSIKANHPLDAESARALLRELSTCKNPYSCAHGRPTIVHFSGDDI | |
| | | QKMFRRIQETHRSKAASWKDFE | |
| L. Lactis MutL | | MGKIIELNEALANQIAAGEVVERPASVVKELVKNSIDAGSSKIIIN | 513 |
| E33 | | KVEEAGLRLIEVIDNGLGLEKEDVALALRRHATSKIKDSADLFRIR | |
| | | TLGFRGEALPSIASVSQMTIETSNAQEEAGTKLIAKGGTIETLEPL | |
| | | AKRLGTKISVANLFYNTPARLKYIKSLQAELSHITDIINRLSLAHP | |
| | | EISFTLVNEGKEFLKTAGNGDLRQVIAAIYGIGTAKKMREINGSD | |
| | | LDFELTGYVSLPELTRANRNYITILINGRFIKNFLLNRAILEGYGN | |
| | | RLMVGRFPFAVLSIKIDPKLADVNVHPTKQEVRLSKERELMTLIS | |
| | | KAIDETLSEGVLIPEALENLQGRAKEKGTVSVQTELPLQNNPLYY | |
| | | DNVRQDFFVREEAIFEINKNDNSDSLTEQNSTDYTVNQPETGSVS | |
| | | EKITDRTVESSNEFTDRTPKNSVSNFGVDFDNIEKLSQQSTFPQLE | |
| | | YLAQLHATYLLCQSKEGLYLVDQHAAQERIKYEYWKDKIGEVS | |
| | | MEQQILLAPYLFTLPKNDFIVLAEKKDLLHEAGVFLEEYGENQFI | |
| | | LREHPIWLKETEIEKSINEMIDIILSSKEFSLKKYRHDLAAMVACK | |
| | | SSIKANHPLDAESARALLRELSTCKNPYSCAHGRPTIVHFSGDDI | |
| | | QKMFRRIQETHRSKAASWKDFE | |
| E. Coli MutL | | MPIQVLPPQLANQIAAGEVVERPASVVKELVENSLDAGATRIDID | 514 |
| | | IERGGAKLIRIRDNGCGIKKDELALALARHATSKIASLDDLEAIIS | |
| | | LGFRGEALASISSVSRLTLTSRTAEQQEAWQAYAEGRDMNVTV | |
| | | KPAAHPVGTTLEVLDLFYNTPARRKFLRTEKTEFNHIDEIIRRIAL | |
| | | ARFDVTINLSHNGKIVRQYRAVPEGGQKERRLGAICGTAFLEQA | |
| | | LAIEWQHGDLTLRGWVADPNHTTPALAEIQYCYVNGRMMRDR | |
| | | LINHAIRQACEDKLGADQQPAFVLYLEIDPHQVDVNVHPAKHEV | |
| | | RFHQSRLVHDFIYQGVLSVLQQQLETPLPLDDEPQPAPRSIPENR | |
| | | VAAGRNHFAEPAAREPVAPRYTPAPASGSRPAAPWPNAQPGYQ | |
| | | KQQGEVYRQLLQTPAPMQKLKAPEPQEPALAANSQSFGRVLTIV | |
| | | HSDCALLERDGNISLLSLPVAERWLRQAQLTPGEAPVCAQPLLIP | |
| | | LRLKVSAEEKSALEKAQSALAELGIDFQSDAQHVTIRAVPLPLRQ | |
| | | QNLQILIPELIGYLAKQSVFEPGNIAQWIARNLMSEHAQWSMAQ | |
| | | AITLLADVERLCPQLVKTPPGGLLQSVDLHPAIKALKDE | |
| E. coli MutL | | MPIQVLPPQLANQIAAGEVVERPASVVKELVKNSLDAGATRIDI | 515 |
| E32K | | DIERGGAKLIRIRDNGCGIKKDELALALARHATSKIASLDDLEAII | |
| | | SLGFRGEALASISSVSRLTLTSRTAEQQEAWQAYAEGRDMNVTV | |
| | | KPAAHPVGTTLEVLDLFYNTPARRKFLRTEKTEFNHIDEIIRRIAL | |
| | | ARFDVTINLSHNGKIVRQYRAVPEGGQKERRLGAICGTAFLEQA | |
| | | LAIEWQHGDLTLRGWVADPNHTTPALAEIQYCYVNGRMMRDR | |
| | | LINHAIRQACEDKLGADQQPAFVLYLEIDPHQVDVNVHPAKHEV | |
| | | RFHQSRLVHDFIYQGVLSVLQQQLETPLPLDDEPQPAPRSIPENR | |
| | | VAAGRNHFAEPAAREPVAPRYTPAPASGSRPAAPWPNAQPGYQ | |
| | | KQQGEVYRQLLQTPAPMQKLKAPEPQEPALAANSQSFGRVLTIV | |
| | | HSDCALLERDGNISLLSLPVAERWLRQAQLTPGEAPVCAQPLLIP | |
| | | LRLKVSAEEKSALEKAQSALAELGIDFQSDAQHVTIRAVPLPLRQ | |
| | | QNLQILIPELIGYLAKQSVFEPGNIAQWIARNLMSEHAQWSMAQ | |
| | | AITLLADVERLCPQLVKTPPGGLLQSVDLHPAIKALKDE | |
| Pa MutL | | MSEAPRIQLLSPRLANQIAAGEVVERPASVAKELLENSLDAGSRR | 548 |
| (wild-type) | | IDVEVEQGGIKLLRVRDDGRGIPADDLPLALARHATSKIRELEDL | |
| | | ERVMSLGFRGEALASISSVARLTMTSRTADAGEAWQVETEGRD | |
| | | MQPRVQPAAHPVGTSVEVRDLFFNTPARRKFLRAEKTEFDHLQE | |
| | | VIKRLALARFDVAFHLRHNGKTIFALHEARDELARARRVGAVC | |
| | | GQAFLEQALPIEVERNGLHLWGWVGLPTFSRSQPDLQYFYVNG | |
| | | RMVRDKLVAHAVRQAYRDVLYNGRHPTFVLFFEVDPAVVDVN | |
| | | VHPTKHEVRFRDSRMVHDFLYGTLHRALGEVRPDDQLAPPGAT | |
| | | SLTEPRPTGAAAGEFGPQGEMRLAESVLESPAARVGWSGGSSAS | |
| | | GGSSGYSAYTRPEAPPSLAEAGGAYKAYFAPLPAGEAPAALPES | |
| | | AQDIPPLGYALAQLKGIYILAENAHGLVLVDMHAAHERITYERL | |
| | | KVAMASEGLRGQPLLVPESIAVSEREADCAEEHSSWFQRLGFEL | |
| | | QRLGPESLAIRQIPALLKQAEATQLVRDVIADLLEYGTSDRIQAH | |
| | | LNELLGTMACHGAVRANRRLTLPEMNALLRDMEITERSGQCNH | |
| | | GRPTWTQLGLDELDKLFLRGR | |
| Pa MutL | | MSEAPRIQLLSPRLANQIAAGEVVERPASVAKELLKNSLDAGSR | 549 |
| (E36K) | | RIDVEVEQGGIKLLRVRDDGRGIPADDLPLALARHATSKIRELED | |
| | | LERVMSLGFRGEALASISSVARLTMTSRTADAGEAWQVETEGR | |
| | | DMQPRVQPAAHPVGTSVEVRDLFFNTPARRKFLRAEKTEFDHL | |
| | | QEVIKRLALARFDVAFHLRHNGKTIFALHEARDELARARRVGA | |
| | | VCGQAFLEQALPIEVERNGLHLWGWVGLPTFSRSQPDLQYFYV | |
| | | NGRMVRDKLVAHAVRQAYRDVLYNGRHPTFVLFFEVDPAVVD | |
| | | VNVHPTKHEVRFRDSRMVHDFLYGTLHRALGEVRPDDQLAPPG | |
| | | ATSLTEPRPTGAAAGEFGPQGEMRLAESVLESPAARVGWSGGSS | |
| | | ASGGSSGYSAYTRPEAPPSLAEAGGAYKAYFAPLPAGEAPAALP | |
| | | ESAQDIPPLGYALAQLKGIYILAENAHGLVLVDMHAAHERITYE | |
| | | RLKVAMASEGLRGQPLLVPESIAVSEREADCAEEHSSWFQRLGF | |
| | | ELQRLGPESLAIRQIPALLKQAEATQLVRDVIADLLEYGTSDRIQ | |
| | | AHLNELLGTMACHGAVRANRRLTLPEMNALLRDMEITERSGQC | |
| | | NHGRPTWTQLGLDELDKLFLRGR | |
| EcSSB (C10) | | PMDFDDDIPF | 516 |
| CFSSB (C10) | | | |
| SeSSB (C10) | | | |
| EcSSB (C9) | | MDFDDDIPF | 517 |
| CFSSB (C9) | | | |
| SeSSB (C9) | | | |
| EcSSB (C8) | | DFDDDIPF | 518 |
| CFSSB (C8) | | | |
| SeSSB (C8) | | | |
| EcSSB (C7) | | FDDDIPF | 519 |
| CFSSB (C7) | | | |
| SeSSB (C7) | | | |
| PaSSB (C7) | | | |
| PaSSB (C10) | | YDSFDDDIPF | 520 |
| PaSSB (C9) | | DSFDDDIPF | 521 |
| PaSSB (C8) | | SFDDDIPF | 522 |
| MsSSB (C10) | | FSGADDEPPF | 524 |
| MsSSB (C9) | | SGADDEPPF | 525 |
| MsSSB (C8) | | GADDEPPF | 526 |
| MsSSB (C7) | | ADDEPPF | 527 |
| LrSSB (C10) | | IDLADDELPF | 528 |
| LrSSB (C9) | | DLADDELPF | 529 |
| LrSSB (C8) | | LADDELPF | 530 |
| LrSSB (C7) | | ADDELPF | 531 |
| LlSSB (C10) | | MEISDDDLPF | 532 |
| LlSSB (C9) | | EISDDDLPF | 533 |
| LlSSB (C8) | | ISDDDLPF | 534 |
| LrhSSB (C8) | | | |
| LrhSSB (C10) | | IDISDDDLPF | 535 |
| LrhSSB (C9) | | DISDDDLPF | 536 |
| LlSSB (C7) | | SDDDLPF | 537 |
| LrhSSB (C7) | | | |
| LlSSB | | MEISDDDIPF | 538 |
| C3:EcSSB | | | |
| LlSSB | | MEIFDDDIPF | 539 |
| C7:EcSSB | | | |
| LlSSB | | MEDFDDDIPF | 540 |
| C8:EcSSB | | | |
| LlSSB | | MMDFDDDIPF | 541 |
| C9:EcSSB | | | |
| LlSSB | | MEIFDDDIPF | 542 |
| C7:PaSSB | | | |
| LlSSB | | MESFDDDIPF | 543 |
| C8:PaSSB | | | |
| LlSSB | | MEIADDEPPF | 544 |
| C7:MsSSB | | | |
| LlSSB | | MEGADDEPPF | 545 |
| C8:MsSSB | | | |
| LrSSB | | IDLADDEPPF | 546 |
| C7:MsSSB | | | |
| LrSSB | | EDGADDEPPF | 547 |
| C8:MsSSB | | | |

### Materials and Methods

### Bacterial Strains and Culturing Conditions

[0270] The E. coli strain used was derived from EcNR2 with some modifications (EcNR2.dnaG_Q576A.tolC_mut.mutS::cat_mut.dlambda::zeoR)6. L. lactis strain NZ9000 was provided as a kind gift from Jan Peter Van Pijkeren. M. smegmatis strain mc(2)155 was purchased from ATCC. The C. crescentus strain used was NA1000.

[0271] All chemicals were purchased from Sigma Aldrich, unless stated otherwise. E. coli and its derivatives were cultured in Lysogeny broth—Low sodium (Lb-L) (10 g/L tryptone, 5 g/L yeast extract (Difco), PH 7.5 with NaOH), in a roller drum at 34° C. L. lactis was cultured in M17 broth (Difco, BD BioSciences) supplemented with 0.5% (w/v) D-glucose, static at 30° C. M. smegmatis was cultured in Middlebrook 7H9 Broth (Difco, BD BioSciences) with AD Enrichment (10× stock: 50 g/L BSA, 20 g/L D-glucose, 8.5 g/L NaCl), supplemented with glycerol and Tween 80 to a final concentration of 0.2% (v/v) and 0.05% (v/v), respectively, in a roller drum at 37° C. C. crescentus was cultured in peptone-yeast extract (PYE) broth (2 g/L peptone, 1 g/L yeast extract (Difco), 0.3 g/L MgSO4, 0.5 mM 0.5M CaCl2), shaking at 30° C.

[0272] Plating was done on petri dishes of LB agar for E. coli, M17 Agar (Difco, BD BioSciences) supplemented with 0.5% (w/v) D-glucose for L. lactis, 7H10 (Difco, BD BioSciences) supplemented with AD Enrichment and 0.2% (v/v) glycerol for M. smegmatis, and PYE agar for C. crescentus. Antibiotics were added to the media when appropriate, at the following concentrations: 50 μg/mL carbenicillin for E. coli, 10 μg/mL chloramphenicol for L. lactis, and 100m/mL hygromycin B for M. smegmatis, 5 μg/ml kanamycin for C. crescentus. For the selective plates used to determine allelic recombination frequency, antibiotics were added as follows: 0.005% SDS for E. coli, 50 μg/mL rifampicin for L. lactis, 20 μg/mL streptomycin for M. smegmatis, and 5 μg/m1rifampicin for C. crescentus.

### Construction and Transformation of Plasmids

[0273] Plasmids were constructed using PCR fragments and Gibson Assembly. All primers and genes were obtained from Integrated DNA Technologies (IDT). Plasmids were derived from pARC8 for use in E. coli, pjp005 for use in L. lactis—a gift from Jan Peter Van Pijkeren, pKM444 for use in M. smegmatis—a gift from Kenan Murphy (Addgene plasmid #108319), and pBXMCS-2 for use in C. crescentus. Genes were codon optimized for each of the host organisms using IDT's online Codon Optimization Tool. E. coli and L. lactis plasmid constructs were Gibson assembled, then directly transformed into electrocompetent E. coli and L. lactis strains. M. smegmatis plasmids were first cloned in NEB 5-alpha Competent E. coli (New England Biolabs) for plasmid verification before transformation into electrocompetent M. smegmatis. All cloning was verified by Sanger sequencing (Genewiz). Plasmids will be deposited in Addgene. All data is available from the authors upon reasonable request.

### Protein Purification

[0274] To prepare Redβ for in vitro analysis, it was first cloned by Gibson cloning into pET-53-DEST, with a 6× poly-histidine tag followed by a glycine-serine linker and a TEV protease site (MHHHHHHGSGENLYFQG) appended to its N-terminus. After purification and treatment with TEV protease, this leaves only an N-terminal glycine before the start codon. Overnight cultures of E. coli BL21 (DE3) (NEB) with the expression construct were diluted 1:100 into Fernbach flasks, grown to an OD of −0.5, and induced with 1 mM IPTG at 37° C. for 4 h. Cultures were pelleted at 10,000×g in a fixed angle rotor for 10 min and the supernatant decanted. Bacterial pellets were resuspended in 30 mL of lysis buffer (150 mM NaCl, 0.1% v/v Triton-X, 50 mM TRIS-HCl pH 8.0) and sonicated at 80% power, 50% duty cycle for 5 minutes on ice. The lysed cultures were again centrifuged for 10 min at 15,000×g in a fixed angle rotor. The supernatant was then incubated for 30 minutes at room temperature with HisPur cobalt resin (Thermo) and column purified on disposable 25 ml polypropylene columns (Thermo). The protein-bound resin was washed with four column volumes of wash buffer (150 mM NaCl, 10 mM imidazole, 50 mM TRIS-HCl pH 8.0) and bound protein was eluted with two column volumes of elution buffer (150 mM NaCl, 250 mM imidazole, 50 mM TRIS-HCl pH 8.0). Protein eluates were dialyzed overnight against 25 mM TRIS-HCl pH 7.4 with 10,000 MWCO dialysis cassettes (Thermo), concentration was measured by Qubit (Thermo) and 1.5 mg of protein was cleaved in a 2 ml reaction with 240 Units of TEV protease (NEB) for two hours at 30° C. The TEV cleavage reaction was re-purified with cobalt resin, except that in this case the flow-through was collected, as the His tag and the TEV protease were bound to the resin. Expression and successful TEV cleavage were confirmed by SDS-PAGE. Protein was concentrated in 10,000 MWCO Amicon protein concentrators (Sigma), protein concentration was assayed by Qubit, and an equal volume of glycerol was added to allow storage at −20° C. E. coli and L. lactis SSBs were prepared according to previously published protocol (Lohman, Green, and Beyer, 1986) without the use of an affinity tag.

### Oligonucleotide Annealing and Quenching Experiments

[0275] Fluorescent (tolC-r.null.mut-3′FAM) and quenching (tolC-f.null.mut-5′IBFQ) oligos were ordered from Integrated DNA Technologies. Unless otherwise indicated, 50 nM of each oligo was incubated in 25 mM TRIS-HCl pH 7.4 with 1.0 μM Ec_SSB or Ll_SSB at 30° C. for 30 minutes. 100 μl of each oligo mixture were then combined into a 96-well clear-bottom black assay plate (Costar), incubated a further 60 minutes at 30° C., and annealing was tracked on a Synergy H4 microplate reader (BioTek) with fluorescence excitation set to 495 nm and emission set to 520 nm. After 60 minutes, 20 μl of a solution with or without 25 μM Redβ and containing 100 mM MgCl₂ was added to achieve a final reaction concentration of 2.5 μM Redβ and 10 mM MgCl₂. The annealing was then tracked over 10 hours in a the Synergy H4 microplate reader with the setting indicated above.

Preparation of Electrocompetent E. coli

[0276] A single colony of E. coli was grown overnight to saturation. In the morning 30 μL of dense culture was inoculated into 3 mL of fresh media and grown for 1 hour. To induce gene expression of the pARC8 vector for recombineering experiments, L-arabinose was added to a final concentration of 0.2% (w/v) and the cells were grown an additional hour. 1 mL of cells were pelleted at 4° C. by centrifugation at 12,000×g for 2.5 minutes and washed twice with 1 mL of ice-cold dH₂O. Cells were resuspended in 50 μL ice-cold dH₂O containing DNA and transferred to a pre-chilled 0.1 cm electroporation cuvette.

Preparation of Electrocompetent L. lactis

[0277] A single colony of L. lactis was grown overnight to saturation. 500 μL of dense culture was inoculated into 5 mL of fresh media, supplemented with 500 mM sucrose and 2.5% (w/v) glycine, and grown for 3 hours. To induce gene expression of the pJP005 vector for recombineering experiments, the cells were grown for an additional 30 min after adding 1 ng/mL freshly diluted nisin, unless stated otherwise. For the optimized condition (FIG. 20B), 10 ng/mL nisin was used. Cells were pelleted at 4° C. by centrifugation at 5,000×g for 5 minutes and washed twice with 2 mL of ice-cold electroporation buffer (500 mM sucrose containing 10% (w/v) glycerol) by centrifugation at 13,200×g for 2.5 minutes. Cells were resuspended in 80 μL ice-cold electroporation buffer containing DNA and transferred to a pre-chilled 0.1 cm electroporation cuvette.

Preparation of Electrocompetent M. smegmatis

[0278] A single colony of M. smegmatis was grown overnight to saturation. The next day 25 μL of dense culture was inoculated into 5 mL of fresh media in the evening and grown overnight to an OD600 of 0.9. Cells were pelleted at 4° C. by centrifugation at 3,500×g for 10 minutes and washed twice with 10 mL ice-cold 10% glycerol. Cells were resuspended in 360 μL ice-cold 10% glycerol and transferred along with 10 μL of DNA to a pre-chilled 0.2 cm electroporation cuvette.

Preparation of Electrocompetent C. crescentus

[0279] A single colony of C. crescentus was grown overnight. The next day cells were diluted back to OD ˜0.001 in 25 mL PYE, and grown overnight. The next day, 250 μL of 30% xylose was added to cells at OD ˜0.2. Cells were harvested at between OD=0.5 and OD=0.7, spun at 10,000 rpm for 10 min, and then washed twice in 12.5 ml of ice-cold dH₂O, washed once in 12.5 ml of ice-cold 10% glycerol, then washed and resuspended in 2.5 ml of ice-cold 10% glycerol. 90 μL of cells were added along with DNA to 0.1 cm cuvettes and incubated on ice for 10 min.

### Recombineering Experiments

[0280] Electrocompetent cells were electroporated with 90-mer oligos at: 1 uM for E. coli, 50 μg for L. lactis, and 10 uM for C. crescentus. 70-mer oligos were used at 1 μg for M. smegmatis. All oligos were obtained from IDT and can be found under “Oligonucleotides for genome editing” in materials and methods. For dsDNA experiments L. lactis was electroporated with 1.5 μg purified linear dsDNA. Cells were electroporated using a Bio-Rad gene pulser set to 25 μF, 200 S2, and 1.8 kV for E. coli, 2.0 kV for L. lactis, and 1.5 kV for C. crescentus and to 1000Ω and 2.5 kV for M. smegmatis. Immediately after electroporation, cells were recovered in fresh media for 3 hours for E. coli, 1 hour for L. lactis, overnight for M. smegmatis and overnight for C. crescentus. L. lactis recovery media was supplemented with MgCl₂ and CaCl₂) at a concentration of 20 mM and 2 mM, respectively. E. coli recovery media was supplemented with carbenicillin. M. smegmatis recovery media was supplemented with hygromycin. C. crescentus recovery media was supplemented with 0.3% xylose and kanamycin. After recovery, the cells were serial diluted and plated on non-selective vs. selective agar plates to obtain approximately 50-500 CFU/plate. Colonies were counted using a custom script in Fiji, and allelic recombination frequency was calculated by dividing the number of colonies on selective plates, with the number of colonies on non-selective plates.

### Protein Structures

[0281] Protein structure images (FIG. 18A) were downloaded from PyMOL: Schrodinger LLC, The PyMOL Molecular Graphics System, Version 1.8 (2015).

### Example 15

[0282] The editing efficiency of SSAP candidates was also tested in Agrobacterium tumefaciens and in Staphylococcus aureus using the methods described above.

[0283] As shown in FIG. 24, PF071 (SEQ ID NO: 205), PF076 (SEQ ID NO: 210), PF074 (SEQ ID NO: 208), and N003 (SEQ ID NO: 3) showed an increase in editing efficiency (as indicated by enrichment on the Y-axis) relative to other SSAP candidates in Agrobacterium tumefaciens.

[0284] As shown in FIG. 25, PF003 (SEQ ID NO: 143), SR033 (SEQ ID NO: 41), SR024 (SEQ ID NO: 32), SR041 (SEQ ID NO: 49), SR081 (SEQ ID NO: 89), and SR063 (SEQ ID NO: 71) showed an increase in editing efficiency (as indicated by enrichment on the Y-axis) relative to other SSAP candidates in Staphylococcus aureus.

The application's sequence listing, which the Patent Office published only in electronic form, follows.

SEQUENCE LISTING (549 sequences)

SEQ ID NO: 1 - protein, 309 aa, Lactobacillus reuteri
MTNQVAQQQKPTKLTDLVLDRVKQMQDTQDLSLPKNYNASNALNAAFLELQKVQDRNHRPALEVCSHDSIVKSLLDMTLQGLSPAKDQCYFIVYGNELQMQRSYFGTVAAVKRLDGVKKVRAEVVHEKDDFEIGANEDMELVVKRFVPKFENQDNQIIGAFAMIKTDEGTDFTVMTKKEIDQSWAQTRQKNNKVQQNFSQEMAKRTVLNRAAKMFINTSDDSDLLTGAINDTTSNEYDDERRDVTPVEDEKQSTDKLLEGFQKSQEAKAKGVSNDGNSNEGKETSEEVADGQTELFSEGTIKPADEADS

SEQ ID NO: 2 - protein, 316 aa, Lactobacillus reuteri
MTNQVANTQQITVKQFVNMNSTKKRFEDVLGKRAPQFMSSLISIVNSDQNLQRVEAASVINSALVAAALDLPINPNFGYMYIVPYNGQAQPQMGYKGYIQLAQRSGQYRKITVAELYEDEFISWDPLMEELKYEAHREKERDEKEQPVGYFGHFELLNGFQKTVYWTRQQVDNRRKRFSQAGGKNSDKPKGVWAKNYNAMALKTVIKDLLTKWGPMTVDMQTAYGADEEEYNENPRDVTPVQDTASAQSEEGYQTQDILNSFDQAEKEKASKEEAKPAKKATKTAKKTVKKGDEVNNANESQEELFPDGTITPHAK

SEQ ID NO: 3 - protein, 269 aa, Escherichia coli
MTKQPPIAKADLQKTQGNRAPAAVKNSDVISFINQPSMKEQLAAALPRHMTAERMIRIATTEIRKVPALGNCDTMSFVSAIVQCSQLGLEPGSALGHAYLLPFGNKNEKSGKKNVQLIIGYRGMIDLARRSGQIASLSARVVREGDEFSFEFGLDEKLIHRPGENEDAPVTHVYAVARLKDGGTQFEVMTRKQIELVRSLSKAGNNGPWVTHWEEMAKKTAIRRLFKYLPVSIEIQRAVSMDEKEPLTIDPADSSVLTGEYSVIDNSEE

SEQ ID NO: 4 - protein, 338 aa, Enterococcus faecalis
MSNDLTQITQRSLDEQVIGNLNRLQEQGLEMPPGYSPQNALKSAFFELTNNSGGNLLQLAANNPETKTSISNALLDMVIQGLSPAKKQCYFIKYGNKVQLMRSYFGTMAVLDRVTGGADITPVVVREGDVFEIAMDGPDLVVAKHETAFENLDNDIKAAYVVIKLANGKEVTTVMTKKQIDKSWSKAKTKNVQNDFPEEMAKRTVINRAAKYLINTSNDNDLFVQAAKDTLENEFERKDVTPEREEQAAVLEEKLFSNNIKAVDQENENERITRVADVPEQPDIEQAKPIEKDNLTKVADQILEEPVQETLDVMAGYETNQKESEADVSTIEEDDYPF

SEQ ID NO: 5 - protein, 307 aa, Enterococcus faecalis
MGNELIVSVQNRIQEMQHGEGLRLPTGYSVGNALNSAYLILSDNSKGKSLLEKCHPTSVSKALLNMAIQGLSPAKNQCYFVPYGDQCTLMRSYFGSVSILERLSNVKKVHAEVIFEGDEFEIGSEDGRTVVTNFKPSFLNRDNPIIGAFAWVEQTDGIKVYTIMTKKEIDKSWSKAKTKNVQNDYPQEMAKRTVLSRAAKMFINSSSDNDLLVKAINETTEDEYDNNQQRKDITPNPPNIEKLEKSIFNQDENKKIAQDMIDSIDLNQADKDLQEELNIEFPDPSKNYLATGEVNGDVENEDGPYPF

SEQ ID NO: 6 - protein, 304 aa, Bacillus subtilis
MAKNDDIRNQLANKVNSVQKEDKPKTLADYLNDMKPELQKALPEHITPERITRIALTTIRSNPGLQQCSPASLLGAVMQSAQLGLEPGLVGHCYFVPFNKKIKGQNGAPDQWVKEVQFIIGYKGMIDLARRSGHIESIYAHAVYEKDEFDYELGLHPKLVHKPSTGHRGEMTHVYAVAHFKDGGYQFDVFSKQDIENVRLRSKSKDNGPWQTDYEEMAKKTVIRRMWKYLPISIEIQKQVAQDETVRKDITSEAQSVYDDNVLDLGGNQFLSEPQQLNEKPSAQDADPFDGKPVDISEDDLPFD

SEQ ID NO: 7 - protein, 295 aa, Agrobacterium rhizogenes
MTQTAERQPRSVLVDMSMRYGMEPAAFEATVRATCMKPDKNGKVPSREEFAAFLLVAKEYNLNPLLKEIYAYPAKGGGIVPIVSVDGWVNLINSQAALDGLEFAIEHTDVGALVSITCRIYRKDRSRPIEVTEYLSECIRNTEPWAMKHRMLRHKALIQCARYAFGFAGIYDEDEGEKIAGMKDVTPPMPPAPPKPPAPPKPDETIADADGVVIEHEEPTVEDVAAANEDVIDDTTYFENLEEAMAVVSDAASLEEVWSDFDPLSRFDGKPQGEVNQGIALAIRKRAEKRIGGAA

SEQ ID NO: 8 - protein, 353 aa, Unknown
  Mycobacterium virus Che9c
MAENAVTKQDSPKAPETISQVLQVLVPQLARAVPKGMDPDRIARIVQTEIRKSRNAKAAGIAKQSLDDCTQESFAGALLTSAALGLEPGVNGECYLVPYRDTRRGVVECQLIIGYQGIVKLFWQHPRASRIDAQWVGANDEFHYTMGLNPTLKHVKAKGDRGNPVYFYAIVEVTGAEPLWDVFTADEIRELRRGKVGSSGDIKDPQRWMERKTALKQVLKLAPKTTRLDAAIRADDRPGTDLSQSQALALPSTVKPTADYIDGEIAEPHEVDTPPKSSRAQRAQRATAPAPDVQMANPDQLKRLGEIQKAEKYNDADWFKFLADSAGVKATRAADLTFDEAKAVIDMFDGPNA

SEQ ID NO: 9 - protein, 211 aa, Unknown
  Lactococcus phage SK1833,Lactococcus phage SK1
MSVFEQLNAINVNSKVEQKKTGKTSLSYLSWSWAWAEFKKVCPTATYEIKKFDDGKGKLVPYLYDNSLGIMVFTSVTVDDITHEMWLPVMDGANKAMKFDSYTYKTKFGEKTVEPASMFDVNKTIMRCLVKNLAMFGLGLYIYSGEDLPDLTEEQKELEAEKQRLREIQPALNRAEELGYPNMELLKTKTKKEIFDIMKIWLAQQETEKGE

SEQ ID NO: 10 - protein, 261 aa, Hafnia alvei
MSNTMMLAPQTFDQAMQFANAIAASQFAPSSYRGKPNDVLIAMQMGAELGFQPMQSVQGIAVINGRPSVWGDALRALILSAPDLAEFEESYDEATQTAHCKISRRLQTGSIATFNSSFSVTDAQTAGLWGKNGPWKQYPKRMQQWRALGFCARDSYADRLKGIQLAEEVQDYEPIEKVVHTPSQDQDSAIENKITEEQSNRINEILISVDSTFDDLKKACKSMTGRDIDNQSELTSTEAAKLISSLERKLASKTGGEKDAA

SEQ ID NO: 11 - protein, 284 aa, Corynebacterium striatum
MSKEIARTQDHLNEMMNWSRAMSQGNLMPRQYQGNPANLMFAAEYADALGISRIHVLTSIAVINGRPSPSADLMSAMVRQHGHKLRVAGDDTYAEAVLIRSDDPDFEYTARWDESKARKAGLWGNKGPWSLYPGAMLRARAISEVVRMGASDVMAGGIYTPEEVGAVVDESGHVVEQPAQHKATRQQAQPQDNSAQARLANMLDATPANTDDPEVWADRIAEAGSEQELMELYATASTNPEWESAIKAMFTARKQQILLDAQYADEAEALDAELVEDTTEESAA

SEQ ID NO: 12 - protein, 268 aa, Unknown
  Lactococcus lactis subsp lactis bv diacetylactis str TIFN2, Lactococcus lactis subsp lactis (strain IL1403) (Streptococcuslactis), Lactococcus phage bIL309
MSNQITKTQQTLKSPEVKKKFEEVLGKKTEGFVASLLSVVGNSNLKNADANSVMTAAMKAATLDLPIEPSLGFAYVIPYGREAQFQIGYKGFIQLALRSGQLTGLNCGIVYESQFVSYDPLFEELELDFSQQASGDAVGYFASMKLANGFKKVTYWSKEQVLAHKKKFVKSANGPWRDHFDAMAQKTVLKAMLTKYAPASIESKMIQTAITEDDSERFENAKDVTPDEPVISIDESMTSEVSQNEPATESQEQLPEDEVEELFPIGKS

SEQ ID NO: 13 - protein, 293 aa, Unknown
  Mycobacterium phage Che8
MSLSFKPATREASYARIALSGPSGSGKTYTALALGTALADKVAVIDTERGSASKYVGLNGWQFDTVQPDSFSPLSLVELLGLAAGGEYGCVIVDSLSHYWMGVDGMLEQADRHAVRGNTFAGWKEVRPDERRMIDALVSYPGHVIVTMRSKTEYVIEENERGKKTPRKVGMKPEQRDGIEYEFDVVGDLDHDNTLTVVKSRIHTLAKAVVPMPGEEFAHQIRDWLSDGARVPTVAEYRKQALAAETREELKALYDEVSGHKLTVAPTVDRDGNSTVLGDLITDLAREMKRAEA

SEQ ID NO: 14 - protein, 210 aa, Unknown
  Xanthomonas phage OP2
MSIADHVAIFLAGSLDAPKAGKAKPDRPEFWGLFAFPPSAGADLTAACQAAAGGSLAGMRLAPKLHSRLEPDKQFAGIPQDWLIVRMGTGPDFPPALFLLDGSSVQALPINGAKIRTDLFAGQKVRVNAHGFAYPPKNGGPAGVSFSLDGVMAVGGGERRSSSSEGGEPSESVFAKYRAEVAAAPAASTAPATTGNPFQQSAAGTDNPFG

SEQ ID NO: 15 - protein, 236 aa, Unknown
  Burkholderia phage BcepNY3
MSTIDKLAGYEAILTHHSIITPQINKLKPTKPAEFYALIALPAAAQADLWAILCERATSAFGHANNFEHGIKTNATSKKPIAGVPGDALVVRAASQYAPEIYDADGTLLNPQNPAHLQTIKAKFFAGTRVRTILTPFHWTFQGRNGVSFNLAGIMLVPSEAQRLAIGGVDTASAFKKFAQPGTGGVPATAGAPTDAAAAFAAGGNPDAAGGTLPANPNPFAQQTGSAAGAGGNPFL

SEQ ID NO: 16 - protein, 186 aa, Unknown
  Pseudomonas phage vB_PaeP_C1-14_Or,Pseudomonas phage vB_PaeP_p2-10_Or1,Pseudomonas phage PaP3
MSKKVSQRFTFPVAKLIFPYIVTPDTEYGEVYQVTICIPTKEQADELVAKMESKDARLKGTIKYTERDGEFLFKVKQKKHVDWMQDGERKSAVMKPIVLTSDNKPYDGPNPWGGSTGEVGILIETQKGARGKGTITALRLRGVRLHEIVSGGDGEDDPLFGGGFTEEEDKPEDVFGEDFDDEDAPI

SEQ ID NO: 17 - protein, 352 aa, Unknown
  Paenibacillus dendritiformis C454
MSDRRAALEMALRQIEKQFGKGSIMKLGESNHMQVEIVPSGSLALDIALGIGGLPRGRIIEVYGPESSGKTTVALHAIAEAQKVGGQAAFIDAEHALDPTYASKLGVNIDELLLSQPDTGEQALEIAEALVRSGAVDIIVIDSVAALVPKAEIEGEMGDSHVGLQARLMSQALRKLSGAISKSKTIAIFINQLREKVGVMFGNPETTPGGRALKFYSTIRLDVRRVETIKQGNDMIGNRTRIKVVKNKVAPPFKQADIDIMYGEGISREGSIVDIGTEMDIIQKSGAWYSYEGERLGQGRENAKQFLKENGELALTIENKVREASNLSTVVRNHSEHDAEEAEDALELELES

SEQ ID NO: 18 - protein, 284 aa, Neisseria lactamica
MSIAQNQAVALAKQFNIQGDPQELVQTLKATAFKGNATDAQFNALMIVSTQYGLNPFTKEIYAFPDKNNGITPVVGVDGWARIINSHPQFDGMEFAADAESCTCKIHRKDRNHPTIVTEYLEECRRNTQPWNSHPRRMLRHKAMIQAARLAFGFGGIYDEDEAQRIQTTETPETPKEVKADPELDSLLAEGEAAANKGIEEYKKWFSEIGATGRLKLGSENHERFKQIAANTIEAETAETLKPTPTEEQFAALVEAVSTGVKEVAEVLEAYALTDEQAAEINAL

SEQ ID NO: 19 - protein, 247 aa, Unknown
  Thalassomonas phage BA3
MSKSELVTQDQSSLPVMAEPHMRLIEIAVEKGADITQLEKLMDLQERYEANQAKKDFNEAMSKFQSLLPTIEKSGVVDYTTNKGRTYYDYAKLEDIAKAIRPALKETGLSYRFSQSQNQGWITVTCIVTHASGHSEVSELTSQPDVSGGKDPLKAIASAISYLRRYTLTGSLGIVVGGEDDDGGNHQEANDETDCYSDEEFKKNFPNWEKAILAGKKTPEQIIKAGNAQGITFSQQQLLTIEKVGNV

SEQ ID NO: 20 - protein, 247 aa, Unknown
  Commensalibacter intestini A911
MVPKTFTPADIVVAVQLGTSIGLSVAQSLHNIAIINGKPSIYGDMMLALCRASPLCEYVKEEMLGNKKEEWVAICTVKRKGNPEVISKFSWQDAVDAKLTGKPGPWLSYPKRMLQMRARGFALRDAFPDLLNGLISQEEAQDYPTQTIEPPPVQLQSKPVAEQEVIQEMPSIEPEKSELIKRYDWLVGQLTDIESREYLEKLTSQTKIINLRNELTEKEPKLAAVITDLIEQALASFEEQGELANAV

SEQ ID NO: 21 - protein, 286 aa, Unknown
  Mycobacterium phage Troll4,Mycobacterium phage Gumball, Mycobacterium phage Nova, Mycobacterium phage SirHarley, Mycobacterium phage Adjutor, Mycobacterium phage Butterscotch, Mycobacterium phage PLot, Mycobacterium phage PBI1
MVQSKIIKVADDEDYVNLLVYGDSGVGKTVFCGSDDKVLFVAPEDNSDGLLSAKLAGTTADKWPIRDWGDLVEAYNYLDELDEIPYNWIVVDSLTEMQIMAMRDILDRAVEENPSRDPDIPQIQDWQKYYEMVKRMIKCFNALPVNVLYTALSRQTEDEEGTEYLLPDLQGKKDNYAKQVVSWMTSFGCMQIKRVRVKTDDDIAKKVKEVRRITWKDTGLVTGKDRTNALTPYTDIRDVTDPEDDGLTLKDIRLRIERKKSGSAKSATTKRPARKTASARTQKESA

SEQ ID NO: 22 - protein, 218 aa, Ureaplasma urealyticum
MVKDDKLVPSIRLLTPNELSEQWANPNSEINQITRAVLTIQGIDLKAIDLNQAAQIIYFCQANNLNPLNKEVYLIQMGNRLAPIVGIHTMTERAYMSGRLVGITQSYNDTNKSAKTTLTIRIPNLKELGVIEAEVFLSEYSTNKNLWLTKPITMLKKVSLAHALRLSGLLAFKGDTPYIYEEMQQGEAVPNKKMFTPPVAEVIEPAVENIKKVDFNEF

SEQ ID NO: 23 - protein, 205 aa, Paenibacillus alvei
MGLKRSESITNLAAALVKFQKEVVSPKNNANNPYFSSKYAPLHEVINVIREPLAKYGLSYIQSTSTDEQNVTVTTLLMHESGEFVESEPLSLPGLQVLKGGGKDFTPQGIGSAITYGRRYSLTAILGIASEDDTDGNEGTPDPRNNPSKGKNQGTGAQTGTGGVKKTIEAKYKLLHDNSLDGLTDFIKEHGANAEQVLTQMLMDR

SEQ ID NO: 24 - protein, 248 aa, Pseudomonas aeruginosa
MGTALTPLLTKFATRYEMGTTPEEVANTLKQTCFKGQVNDSQMVALLIVADQYKLNPFTKELYAFPDKNNGIVPVVGVDGWARIINENPQFDGMEFSMDQQGTECTCKIYRKDRSHAISATEYMAECKRNTQPWQSHPRRMLRHKAMIQCARLAFGFAGIYDQDEAERIVERDVTPAEQYEDVSEAICLIKDSPTMEDLQAAFSNAWKAYKTKGARDQLTAAKDQRKKELLDAPIDVEFEETGDDRAA

SEQ ID NO: 25 - protein, 208 aa, Unknown
  Salmonella phage SETP3
MGIKLNLRKVQTAWLNVFERAKDRENSDGSITKGTYNGTFILTPEHPQIEELRDTVFAVVSEALGEAAAEKWMKQNYGEGKHMDKCAVRDIAERDNPFEDFPEGFYFQAKNKQQPLILTSVKGEKQVEPDFNIDGEQIEGKQVYSGCVANISIEIWFSEQYKVLGAKLNGIKFAGEGKAFGGSAVSASVDDLEDDEDETPRRERRRNR

SEQ ID NO: 26 - protein, 215 aa, Unknown
  Paenibacillus dendritiformis C454
MGTEKLNIYQKLLEVRKSVSYLKKEETSQQYKYTGSAQVLASVRDKINEMGLILVPRILDKSLLTETVEFIDKEKPKKTTTYFTELTLSMTWVNADNPSETVECPWYSQGVDIAGEKGVGKALTYGEKYFILKFFNIPTDKDDPDAFQKKFEQKASKEIQAKIRETWIKLGLKINLLEHQCKTIYGSGLAQLSEEAAEEFLTMLEAKMGDPDGVN

SEQ ID NO: 27 - protein, 307 aa, Enterococcus faecalis
MGNELIVSVQNRIQEMQHGEGLRLPTGYSVGNALNSAYLILSDNSKGKSLLEKCHPTSVSKALLNMAIQGLSPAKNQCYFVPYGDQCTLMRSYFGSVSILERLSNVKKVHAEVIFEGDEFEIGSEDGRTVVTNFKPSFLNRDNPIIGAFAWVEQTDGIKVYTIMTKKEIYKSWSKAKTKNVQNDYPQEMAKRTVLSRAAKMFINSSSDNDLLVKAINETTEDEYDNNQPRKDITPNPPNIEKLEKSIFNQDENKKIAQDMIDSIDLNQADKDLQEELNIEFPDPSKNYLATGEVNGDVENEDGPYPF

SEQ ID NO: 28 - protein, 226 aa, Unknown
  Enterobacteria phage HK629,Salmonella phage HK620 (Bacteriophage HK620)
MGTATLILGESGTGKSTSMRNINPEEAILIKPIGKPLPFKSKEWLAWDARAKKGTVVTTDKWDVIVAVIKRAHEYGKRIVIVDDFQYVMSNEFMRRSEEKSFDKFTEIGRHAWEVIKAAQDAPDDLRVYFLAHTEETPMGRVKMKTIGKMLDEKITVEGMFTIVLRTLTRDDQFFFTTKNNGADTVKSPMGMFDSNEIDNDLSFVDATVCDYYGINNVHQIKENAA

SEQ ID NO: 29 - protein, 237 aa, Unknown
  Klebsiella pneumoniae subsp rhinoscleromatis ATCC 13884
MAGKLASRLGMDAGTDLMNTLKNTAFKGGNVTDDQFTALLIVANQYGLNPWTKEIYAFPDKGGIVPVVGVDGWVRIINEHPQFDGMGFTYDKEEGACTCKIYRKDRTHPTIVTEYMGECKRNTQPWQSHPTRMLRHKTLIQCARLAFGFAGIFDQDEAERVIEGSAAEVHVGHESDSRRPELIAKGESAARLGTVKYQEFWVALSAEEKQVIGAVEKRRMYDMSLAVDNAEPVDAAA

SEQ ID NO: 30 - protein, 248 aa, Clostridium sporogenes
MAENKNSAVALLEKEMVYQVGEEEVKLTGSIVKNYLAKGNKQITNREVVVFMNLCKYRKLNPFLNEAYLVKFKDEAQIVTGKEAFMRKAEENPNYKGHRAGIIVMREKEIVELEGCFKLKTDTLLGGWAEVMVEGKNCPIVAKVSLEEYNKQQSTWKSMPSTMIRKVALVQALREAFPAEIGAMYSNEELGVDESKIVNVQHEVKEEIKEEANKEVIDIEETELVEKETPVVEAEIVEPKDGEEETPY

SEQ ID NO: 31 - protein, 216 aa, Unknown
  Staphylococcus phage SA97,Staphylococcus phage phi7247PVL,Staphylococcus phage phiETA3,Staphylococcus aureus, Staphylococcus phage phi5967PVL
MAEQLNLYQKIADVKANIAGFTKDTKGYNFSYVSGSQILHRIREKMIEHNLLLVPNTSNENWTTHTFKNKKGQEVTEFIVEMDLNYTWINADKPEEQYEVSYHAYGQQNDISQAHGTALTYAERYFLMKFFNIPTDEDDADAKQKQDKYSTVSQEFKDILTKEVNDFIAIAKESGFAEKYQEQINKLEKMNVEALNKNQINVTRQQIKKWLGGIEQ

SEQ ID NO: 32 - protein, 199 aa, Unknown
  Paenibacillus lactis 154
MAIDNQSTKVITGKVRLSYTHVFEPQENDSGDMKYSTAILIPKSDKETLRKIKAAVDAAKELGKSKWGGKIPANCKTPLRDGDEERPDDEAYAGHYFLNASSKNKPGVAKPIGKDGNGKTKFQEITDSTEVYSGCYAKVSLNFYPFDAKGNRGVAAGLNNIVKVQDGDFLGGRSSVNDDFANEDFDDIVDISDDDDFLN

SEQ ID NO: 33 - protein, 259 aa, Unknown
  Desulfitobacterium metallireducens DSM 15288
MAITPNPIPAQDGSPIPSPDDIVGELARRKIYAGIPDDDVALALALCQKYGFDPLLKHLVLLATKDRDETTGQGQKHYNAYVTRDGLLHVAHTSGMLDGLETIQGKDDLGEWAEAVVYRKDMSRPFRYRVYLSEYVREAKGVWKTHPQAMLTKTAEVFALRRAFDVALTPFEEMGFDNQNIAGDTGPSPKTGFTEKAGFTGNTDFSAEASLPGKARFSTEAGLTDMTVIPPNRVTGSIPETSRLNTSAGSTGRQRRQLF

SEQ ID NO: 34 - protein, 271 aa, Listeria monocytogenes
MATNDELKNQLANKQNGGQVASAQSLDLKGLLEAPTMRKKFEKVLDKKAPQFLTSLLNLYNGDDYLQKTDPMTVVTSAMVAATLDLPIDKNLGYAWIVPYKGRAQFQLGYKGYIQLALRTGQYKSINVIEVRDGELLKWNRLTEEIELDLDNNTSEKVIGYCGYFQLINGFEKTVYWTRKEIEAHKKKFSKSDFGWKKDYDAMAKKTVLRNMLSKWGILSIDMQTAVTEDEAEPRERKDVTEDESIPDIIDAPITPSDTLEAGSEVQGSMI

SEQ ID NO: 35 - protein, 287 aa, Bacteriophage SPP1
MATKKQEELKNALAQQNGAVPQTPVKPQDKVKGYLERMMPAIKDVLPKHLDADRLSRIAMNVIRTNPKLLECDTASLMGAVLESAKLGVEPGLLGQAYILPYTNYKKKTVEAQFILGYKGLLDLVRRSGHVSTISAQTVYKNDTFEYEYGLDDKLVHRPAPFGTDRGEPVGYYAVAKMKDGGYNFLVMSKQDVEKHRDAFSKSKNREGVVYGPWADHFDAMAKKTVLRQLINYLPISVEQLSGVAADERTGSELHNQFADDDNIINVDINTGEIIDHQEKLGGETNE

SEQ ID NO: 36 - protein, 260 aa, Haemophilus influenzae
MATALQTLTNKLADRFDMGDGTGLTDVLTNTAFRGQKVSQDQMTALLVVANQYGLNPWTNEVYAFPNNGGIVPIVGVDGWARIMNEHPQYDGMDFSFSEKGDSCTCTIYRKDRSRPIIVTEYMAECQRNTQPWKSHPKRMLRHKAMIQCARLAFGFTGIYDQDEAERIVETKDPINVTPQPTVIETQAVELITPEQIEQITQLVEVTQSNMTQLLAAAGRAPSLEKVTKANAKHVIEKLLTKLDKQQAQDEQLGEDVPIC

SEQ ID NO: 37 - protein, 232 aa, Clostridium botulinum
MANLMEIENKFEVNGAEVKLTGSIVKNYLTRGNDAVSDQEVVMFINLCKYQKLNPFLNEAYLVKFKGSPAQIITSKEAYMKKAERNTNFAGMKAGIIVQRDKEILELEGSFCLKTDILLGGWAEVYKKDREFPYKAKINLDEYDKGQSTWKKMPKTMIRKTAIVQALREAFPEDLGAMYVEEEQQYQQDMSVEIKEEIKEKGNSKPLTLNPKTTENVQNVQEVKVEEVEIIN

SEQ ID NO: 38 - protein, 192 aa, Unknown
  Synechococcus phage Syn5
MANRYVFNTTLEGFINVYEDSGKFNNRTFAYKFDAATLEQAEKDREELLKWAKSKATGRVQEAMTPWDDEGLCKYTYGAGDGSRKGKPEPIFVDSDGEVIDRNVLKDVRRGTKVRLIVQQKPYSMGPNVGTSLRVLGVQIIELATGNGAVDSGDLSVDDVAALFGKADGYKASEPAVRKAEDTVGDGDSYDF

SEQ ID NO: 39 - protein, 284 aa, Unknown
  Peptoniphilus duerdenii ATCC BAA-1640
MANIVKYETSNGEVQLDKQTIKNYLVSGDADKVTDQELELFINLCKYQKLNPFLRDAYLVKFGDKPANMIVGKDFFIKRASANENFKGYTAGVIVLGKTGNIEERPGSFYAKQVESLVGAWCKVEFTNGTDFYHTVAFDEYNTGKSTWASKPATMIRKVALVQALREAFPEDYQGLYDSSEMGVNEEVLPTDGVKVKAPTISKEQFNLLLKTLGEDAIVDFCKSKGYNDAAKIKVDEYEKLIAEATKKKLEDEEVIEYEDVDPDFKDLQDEDNNFEINEEELPF

SEQ ID NO: 40 - protein, 299 aa, Unknown
  Paenibacillus mucilaginosus 3016
MAAPAKATDQKDLSKALANKAAAGNGQGKTIAQLFDEMKPAIAQAIPKHLTPERLLRIATTSIRTNPKLKVCTPESLLGAVMQCAQLGLEPSILGHAYLVPYRNKKKEGNKEYFVDEAQFQIGYKGLIELARRTGHISSIMSQAVHEKDLFEYEYGINEKLRHVPADGDRGPVTKYYAYAKFKDGGYSFMVMSKRDIELHRDKFSKAKFGPWVDHFDEMAKKTVLKALMKYMPISVEFQKAVSMDETTKREVSDDMSEVIDVTDWSESSAEDAGGGDEQRDPDTGLLNDRPPDDQVEFE

SEQ ID NO: 41 - protein, 252 aa, Unknown
  Lactococcus phage bIL286,Lactococcus lactis subsp lactis (strain IL1403) (Streptococcuslactis)
MADYEEQMLALQKPLQPDRVVWRVQQSGFSKQGKPWAMVLAYMDNRAVQERFDEVFGIAGWKNEFKTAPDGGTLCGISVKFGDEWVTKWDGAENTQVEAVKGGLSGSMKRAAVQWGVGRYLYDLPTSFAQTSLEKTDGWNKVFDKNSKKNFWWKNPQLPSWALPQNSKVQNTKADFTEEEIPNPPKLYVVGKDKKEFDEKKLQAVVNKMAIIAGKDYGASVDEQNDWLKMPLDEAYNDIEKFVDIKKEEQND

SEQ ID NO: 42 - protein, 199 aa, Drosophila melanogaster
MASNNSSTTDLDSQVNVEDLPITFKVKYIGSEVARGLWGIKYTRRPVDIMVGVAKNLPPNKVLPNCELKVSTDGVQLEIISPKASINHWSYPIDTISYGVQDLVYTRVFAMIVVKDESSPHPFEVHAFVCDSRAMARKLTFALAAAFQDYSRRVKEATGEEEGEATPSDTITPTRHKFAIDLRTPEEIQAGELEQETEA

SEQ ID NO: 43 - protein, 206 aa, Unknown
  Burkholderia phage BcepNazgul
MAREIKFKGKNVVVFTDGTMRIENVRASYPHLAKPYKGDDQEGQEKYSLVGFIEKDLAKSVLEVMKKMRDEMLREKNDGKKIPTDKFFFRDGDASGKDEYEGCYTINASETKRPSVRGADKRLLGEREIENTIYAGCRVNILINPWWQDNKFGKRINANLLAVQFVRDDEPIGEGRISEDEIDDSFDDVSDGEEALAEGYDDNGGL

SEQ ID NO: 44 - protein, 294 aa, Legionella pneumophila
MATQKVDKRSMMVANQKTVMGLLEQMKGEIARCLPKHLTPERMARIAMTELRKTPKLQECDPLSFIASIMQAAQLGLEPGILGSCYLIPFWNSKLGKFECTFMPGYRGFLDLARRSGQIVSLVARSVYENDEFSYEFGLKENIIHKPAMDNKGQLIAVYAVAILKDGGHQFDVMSKEEVDTVRETSKSKDNGPWVTHYEEMAKKTVLRRLFKWLPCSVEMQKAVSLDEMQEAGMQNIKVAASEEFDIDFVIDADTGEVTEIPGNKSREDLKALIEKNKAESKNSQEKETNQDKA

SEQ ID NO: 45 - protein, 245 aa, Unknown
  Lactococcus phage phi311,Lactococcus phage ul36k1t1,Lactococcus phage ul362,Lactococcus phage ul361,Lactococcus lactis, Lactococcus phage ul36k1
MANELGIFSVDNLNMTTIKQYLDGGGKASDAELVLLINLCKQNNMNPFMKEVYFIKYGNQPAQIVVSRDFYRKRAFQNPNFVGIEVGVIVLNKDGVLEHNEGTFKTHEQELVGAWARVHLKNTEIPVYVAVSYDEYVQMKDGHPNKMWTNKPCTMLGKVAESQALRMAFPAEFSGTYGEEEYPEPEKEPREVNGVKEPDRAQIESFDKEDYAAKKIEELKEKAQPQKEVVEETGEVIDEEPLEGF

SEQ ID NO: 46 - protein, 248 aa, Unknown
  Streptococcus phage M102
MAKNELAKGSYLTDLQKLDGNTLRDFVDPKHQASPQELQALLAIVKGRNLNPFTKEVYFIKYGSAPAQIVVSKEAIMKRAEENPDFDGFEAGIVVETKDGAIERLTGTIVPKSATLRGGWCKVYRKDRSHAIEADADFAYYTTSKNLWQKMPALMIRKVAIVSAFREAFSESVGGLYTADEMQRETQAEVRARKMKEAYEEKLYLLTQMEAKSYKKTKSKNENEAKKTKEAEAIETVEEPTQDGNLEW

SEQ ID NO: 47 - protein, 235 aa, Unknown
  Streptococcus phage MM1 1998,Streptococcus pneumoniae, Streptococcus phage MM1
MADLTFAELQRKMQIEKQTKQGVKYPFRTAEDINNKFKSLDSGWSVSFPEDDIIQKGDKLYYKAVAVVKRESDGTIEKAIGWAREEDVPIFHTQKGDVKQMQDPQWTGAVGSYARKYALQGLFAIGGEDVDEYPVEESQEQGQNNQQQKPNNQQAQGQNQVRYIDNTQYQEINDLINDIAKIKGMPFDTLANYVLSEKLKGLQDFHRVQVGDYEVLKNYLTEQLAKAKAKAKRGN

SEQ ID NO: 48 - protein, 311 aa, Unknown
  Paenibacillus elgii B69
MAQNKAIQTIDTQAVVGSFTQSELDTLKNTIAKGTTNEQFSLFVQTCARSGLNPFLNQIYCIVYNTRDHGPTMSIQIAVEGIVALAKRHPQYKGFIASEVKENDEFQIDVVSGEPVHKIKTLQRGKTIGAYCVAYREGAPNISVIVTLDQIEHLLKGRNATMWKDYLDDMIVKHAIKRAFKRQFGIEVAEDEYIPSGPNIDNIPEYQPQARRDITHEAEQMNNEKEQPASPQPSEDDEAAKIKKARTEMKKKFAQLGITDPEEISAYIAKNAKIKGEKPTLAEYTGLLKIMDMEIERRKAEQANDDDLLMD

SEQ ID NO: 49 - protein, 201 aa, Unknown
  Burkholderia phage BcepC6B
MAKIKLTNVRIAFINNLRTPAEFEAGDGKFRYSATFLVEKGSANDKAIEAAIKSVAVEGWAKKADAMLESFRSNSNKFCYQNGDLKDFDGFEGNMYIAAHRKRDDGRPLLLDNVADPETGKPARLVDANGEWLAGKEGRIYAGCYVNATIDIYAQTKTNPGIRCGLMGVQYHGPGDSFSGASRANEDDFEATAPETEDELD

SEQ ID NO: 50 - protein, 232 aa, Unknown
  Yersinia phage YpsP-G, Yersinia phage phiA1122
MAKKIFTSALGTAEPYAYIAKPDYGNEERGFGNPRGVYKVDLTIPNKDPRCQRMVDEIVKCHEEAYAAAVEEYEANPPAVARGKKPLKPYEGDMPFFDNGDGTTTFKFKCYASFQDKKTKETKHINLVVVDSKGKKMEDVPIIGGGSKLKVKYSLVPYKWNTAVGASVKLQLESVMLVELATFGGGEDDWADEVEENGYVASGSAKASKPRDEESWDEDDGDSYEEDSDGDF

SEQ ID NO: 51 - protein, 335 aa, Unknown
  Prochlorococcus phage P-SSM2
MDFLKEIVKEIGDEYTQVAADIQENERFIDTGSYIFNGLVSGSIFGGVSSSRITAIAGESSTGKTYFSLAVVKNFLDNNPDGYCLYFDTEAAVNKGLLESRGIDMNRLVVVNVVTIEEFRSKALRAVDIYLKTSEEERKPCMFVLDSLGMLSTEKEIRDALDDKQVRDMTKSQLVKGAFRMLTLKLGQANIPLIVTNHTYDVIGSYVPTKEMGGGSGLKYAASTIIYLSKKKEKDQKEVIGNLIKAKTHKSRLSKENKEVQIRLYYDERGLDRYYGLLELGEIGGMWKNVAGRYEMNGKKIYAKEILKNPTEYFTDDIMEQLDNIAKEHFSYGTN

SEQ ID NO: 52 - protein, 235 aa, Unknown
  Salmonella typhimurium, Salmonella phage ST160,Salmonella phage ST64T (Bacteriophage ST64T)
MDLNKFDAPFNPEDIEWRIQQSGKTRDGKVWAMVLAYVTNRAIMKRLDDVCGKEGWRNEYRDIPNNGGVECGISIKIDSEWVTKWDAAENTQVEAVKGGRSGAMKRAAVQWGIGRYLYNLEEGFAQISSDKKQGWHRAKLKDGTGFYWLPPSLPDWAMPASCNQPSPENTNQKSPSVDCEQILKDFSDYAATETDKKKLIERYQHDWQLLAGHDDAQTRCVQVMNIRINELKQVA

SEQ ID NO: 53 - protein, 126 aa, Unknown
  Salmonella phage SS3e
MDKCAVRDIAERDNPFEDFPEGFYFQAKNKQQPLILTSVKGEKQVEPDFNIDGEQIEGEQVYSGCVANISIEIWFSEQYKVLGAKLNGIKFAGEGKAFGGSAVSASVDDLEDDEDETPRRERRRNR

SEQ ID NO: 54 - protein, 255 aa, Bacteroides caccae
MEENKLTKQENDALAIFGKGKTIYQVAGNDVALSFDIVRNYLTKGNGQVSDQDIVQFISICKFNQLNPFLNEAFLVKFGQQPAQMIVSKEAFFKRADASEKYEGFKAGIIIIRDNKIVEVEGCFYNEKTDILVGGWCEVYRSDRRFPIIAKVNLAEYDKKQSIWNEKKSTMISKIAKVQALREAFPAQLGAMYTQEEQEVKFAEYEDVTDKESKANKLAEIALKNAGVEEQPKTEQPVNQPQNNTNDKPAQKTLL

SEQ ID NO: 55 - protein, 261 aa, Unknown
  Lactobacillus prophage Lj928,Lactobacillus johnsonii (strain CNCM I-12250 / La1 / NCC 533)
MEIYGKEEDRAKWAMHYAQVKANIKQPEKTHKVTVSGKTKQGTPYSYDYNYADLNDIDAAVMDGIKKVTDKDGNVVFSYFFDIRTENNTVEVQTILVDSSGFTLKTNKVVFQNNKAWDAQATASLISYAKRYSLSGAFGIAADNDDDAQDQKTIYEPKILTKQELEDYKVYYNGIQANLYDLYQEAKDGIKDAQDWLKEPHTPQDAQAVHQIAEMFKQNHSVKQETKEKQAAIDKIRQTVKKDPFEDKKVESKDPEVDKLF

SEQ ID NO: 56 - protein, 220 aa, Unknown
  Burkholderia phage BcepGomr
MECEMPLNWTTTANAARNGVKVLCYAPAGYGKTVLGATAPRPIILSSEFGNLSIRKHNIPVLEIRNGLDMRDAYDWIMKSNEFKQHFDTLVWDGASESAETFLRVAKASGGDGRAHYGTVADMIADYFTKFRALPEKHVYITAKMGFVQDSVTGGVKYGPDFPGKQLGQQSPYWLDEVFTLRIGTLPDGTGTYRYLQTQPDPQYDAKDRSGSLDAMSSRT

SEQ ID NO: 57 - protein, 179 aa, Lactococcus bacteriophage c2
MESKVLKLINEIKVPKSQYNSFGKYNFRNNEDIQTALKPLLLQFGLMEKATTEMLEMNNELMLHVHIDIFDPDNPNDIASGDGWAVIDINKKGMDKAQATGASQSYASKYAYGQALKLDDTKDADSTNKGPNNATQMKSRPKSNYQYNLSDLKKKVANKEISSDQANELCKQGKVNMNA

SEQ ID NO: 58 - protein, 257 aa, Fusobacterium ulcerans
MEVKNNLVKTEEKKNVVNFTVDGMDVKLSPAIIRSYLVNGNGAVTEQEINYFIQLCKARQLNPHVKDAYLIKYGSQPATMVVSKDAIERRAIKHPQYNGKKVGIYVLDKNNELVKREHSILLEDEKLVGAWCEVYRKDWEFPAKADVNYEEYVGRKSDGTVNSQWANKPVTMLTKVAKAQALREAFIEELGGMYDSSEMSKDIPNIEEIIEAPKQDLEMKNFIEDNKEEIKDKQEKILKEAEKVEEDEEIQEIFGKK

SEQ ID NO: 59 - protein, 218 aa, Unknown
  Streptococcus phage 7201
MEEMTFTELQQKIQLEKKKEGTAKYASRHVEDIYNVFKNLKSNWNVVVNYELVEFSGKTFIKAIATASNKDEKVQAQAFAELSPVPILKTRNGELKQMNEPQWVGAVQSYAGKYALQALFAIGEEDVDHFEVAEQSMRPNQNHNQMQSHQQANYINQQQHNQINQLIDELAKVTGQPVETVARYYLGKYKLNNFSELLTTGFDILANDIQDKIKQRKG

SEQ ID NO: 60 - protein, 278 aa, Unknown
  Lactobacillus prophage Lj965,Lactobacillus johnsonii (strain CNCM I-12250 / La1 / NCC 533)
MELLNQPTPPISSPQAVGLMNIQTIVGMDAKQSLDAKLSLLNDFVEMKRVLAQPSKSKDGYGYKYADLNDVLSVIQQAIGDLDLSFIQQPINKTAKTGVENYVFNSKGAILDFGSYMLDITKPQAQQYGSALTYCRRYSISSIFGIASEEDTDAKALPQYMSPEEIDRLTLPYKGKQVSLAKLFSLGLAGDSKAKAKLLDRENNNVTKLAVKSMTDMWDFSKDIEAMKINEQTEIKASKDQEEKAKQAALNKVQKGKKDPFEDKKVESDSDPEVDKLF

SEQ ID NO: 61 - protein, 202 aa, Unknown
  Clostridium phage phiC2,Peptoclostridium difficile E15,Clostridium phage phiMMP03,Peptoclostridium difficile (Clostridium difficile)
METNNVYIKLVNIQSTLKAPKSQFNSFGKYNYRSCEDILEGLKPILKEEKALVILDDNIVQIGNRFYVEATATLIDAETGEKVSTKALAREDETKKGMDLAQVTGSVSSYARKYALNGLFCIDDTKDSDATNKHGNEQKKKEVNESELNTLYSLGESIEKDKNRVDSEVYKKFGKLAVDLTKQEYEKVLNGYKSILEKQKQE

SEQ ID NO: 62 - protein, 260 aa, Unknown
  [Clostridium] methylpentosum DSM 5476
MEKGKQVLAEKKPEENIRLDENNIFTGFREFQVAQRMATALASSTIVPKDYQNNPGNCLIALEMANRLKTSPMMVMQNLYVVNGRPAWSSQYIVAMINSSRKYKTELQYEMKGSRTDGSLECTAWVEDYNGHRVTGPTVTMKMAQEEGWIGRNGSKWKTMPEVMIRYRAASFFGRLNCPDMIMGIYSEEEAIELEPSQFEFVDQVKAAEQEIKDNVGRQDIDVDVHTGEVITKPTAQTQVEEESGEPDLETQMSIEEPDF

SEQ ID NO: 63 - protein, 272 aa, Unknown
  Vibrio cholerae (strain MO10),Vibrio cholerae, Providencia alcalifaciens Ban1,Vibrio cholerae Ind4
MEKPKLIQRFAERFSVDPNKLFDTLKATAFKQRDGSAPTNEQMMALLVVADQYGLNPFTKEIFAFPDKQAGIIPVVGVDGWSRIINQHDQFDGMEFKTSENKVSLDGAKECPEWMECIIYRRDRSHPVKITEYLDEVYRPPFEGNGKNGPYRVDGPWQTHTKRMLRHKSMIQCSRIAFGFVGIFDQDEAERIIEGQATHIVEPSVIPPEQVDDRTRGLVYKLIERAEASNAWNSALEYANEHFQGVELTFAKQEIFNAQQQAAKALTQPLAS

SEQ ID NO: 64 - protein, 230 aa, Unknown
  Listeria welshimeri serovar 6b (strain ATCC 35897 / DSM 20650 /SLCC5334),Listeria phage PSA
MLEFIQSEEMKRSEYFNIMIYAKPGAGKTTTIKYLKGKTLMLDCDGTSKVLSGLPDITIATLNPRNPVQDMADFYGYAKTHADEYDNVVIDNLSHYQKLWLMFNGRNTKSGQPELQHYGIFDTHLIDMISVFNNLANTNIVYTAWENTRQIQLESGQLYNQFLPDIREKVVNHVMGIVPVVARLIRNPETGQRGFLLTENNGNFAKNQLDNREFALQEDLFKIGDIDAKA

SEQ ID NO: 65 - protein, 261 aa, Hydrogenobacter thermophilus
MLSKANTNTIVREEDYKKVLQMLRVALPSLAKVDDETLITAVAYARHLGLDPLRKEVHFVPYYNKELNKTIIQPIVSYTEYLKRAERSGKLKGWSCKFRKEGDELVAVVEIKRVDWEIPFVWEVPLSEVKRDTPLWQSHPLFMLKKTAIAQAFRMCFPEETSHLPYEEAEFWEEPSIPEQTQPTKTDVDTDTESDYITEAQRKRFFAIVKKELGYREDAIKEILKERFGIESTAEIPKDKYEEIIDYFRSLSKPIEAEAQS

SEQ ID NO: 66 - protein, 98 aa, Paenibacillus polymyxa
MLFRRRAASAFVRKVLYFAIICGLLWLLWLGLHGVMSTGEDDQAVEALNEFYTMEQSGNFGGSWEFFHSQMKKKFEKSTYVQQRARFYAGYGDGYVHV

SEQ ID NO: 67 - protein, 233 aa, Bacteriophage SFi21
MRIIRAKDIQRTKNWRILIYGKAGLGKTSLIKNMPGKTLVLSLDNSSKVLAGTENVDIIDFDREHPTEFITEFLTQADNLIKNYENLVIDNISSFQSDWFIEQGRKSKNGISNELQHYSQWTNYFLRVLTVIYSKPINIYVTAWEDTHELNLETGQILTQYVPQIRASVLNQLLGLTDVVGRIVVNAKTGARGLILEGSEGTYAKNRLDNRTACKIEDLFKFGDLDGTKELPE

SEQ ID NO: 68 - protein, 223 aa, Unknown
  Lactobacillus phage phiadh
MPAFKWDEDKGTKYRWLVYGVPGVGKTTLSKYLKGKTYLLSLDESFHRIDFWKGKNDIWSIDPEKPIEDLADFVKAFKPDKYDNLIIDNVSNLQKLFFIEKARETRTGLDNKMSDYNEWTTLITRFIAKCFSWNINILVTAWEAQNKVTDPSGQEFMQYGPDIRPNPRDYILGNCDVVARMVQKPQTGERGLIMQGSIDTYAKNRLDGRKGCKVEDFFEVQDK

SEQ ID NO: 69 - protein, 240 aa, Unknown
  Mycobacterium phage: PhatBacter, Elph10, 244, Cjw1, Phrux, Lilac, Phaux,  Quink,  Pumpkin,  Murphy
MPDEAQTGPLAEDPAPHTPTVFEAWSRVMSDVQAISKDSRNEQQHFNFRGIDAVMNVVGPALRAHGVTVIPRAVEEYSERYETQPRGNRPGTPMINRLVRVEFTVFGPRGDWFAGTTYGEAADSGDKAMSKAHSVAYRTFLLQALTIPTDEPDPDEDVHERAPRQERRREPKDEPPPLSDENAEGRAELREFCEENNLDAKVVAGKFATDNPGQSIRTADNETIRAYIATMKAGLVKADV

SEQ ID NO: 70 - protein, 224 aa, Unknown
  Cryptobacterium curtum (strain ATCC 700683 / DSM 15641 / 12-3)
MPQEIAKVEYTAADGQEVRLTPGVIAKYIVSGNGLASEKDIYSFMARCQARGLNPLAGDAYMTVYQGKDGNTSSSVIVSKDYFVRTATAQDSFDGMEAGVTVLNGQGQIQKREGCEFFPSLGEKLLGGWAKVHVKDREHPSKAAVTMDEYDQHRSLWKSKPATMIRKVAIVQALREAYPGQFGGVYDRDEMPPSQEPQQVPVEVYEAPEAYETPDNQNRATEEF

SEQ ID NO: 71 - protein, 226 aa, Bacteriophage T1
MHLIHQSGEVKMQLSPETNEILPALFNARNKFAKAKKDAKNNHLKNSYATLDAMMAAVSPALTDNDIMILQSMLDTSTETTFHLETMLIHKSGQWAKFFMMMPIAKRDPQGVGSAMTYARRYSLAAALGISQSDDDAQLAVKSVKDWKKELDACEDIESLKDVWANAYRQTDTASKSIIQDHYNALKAKFEIGKARGIRPAQPEQKKQVEATSAKPVQSQSITNFE

SEQ ID NO: 72 - protein, 235 aa, Unknown
  Acinetobacter sp SH024
MQDVDPAELANTLVNTVFKKATNDEFLSLLIVANQYKLNPFTKEIYAFPAKGGGITPVVGIDGWARIINDNPVCDGIQFEQDDESCTCKIFRKDRNHPTVVTEYLSECQGNSEPWKKYPKRMLRHKALIQCARVAFGFSGIYDEDEARRIDDCHIPTVQTVSSDLPQGYEAYEQQHLDNMRALAMEGTEALQTGYAELPQGDCKKYFWTKHSASLKEAAQHADQPQGQVYEHSPA

SEQ ID NO: 73 - protein, 221 aa, Paenibacillus alvei
MQRKKLKRVMKSTNMGEDALLKTFDNFDLSDLDQRVINSYELAREYSDGLIYRIKNAKSLKGVPWFGILGTSGSGKTHLVTAAVAPLIKYDVYPLFFNWVQSFTEWFSYYNTDESYMVEEIRQRIYNCELLVVDDICKESQKDTWIKEFYGIVDYRYRKQLPIVYTSEYFAELIGFLSKATAGRLFERTVSPKGKKFLGEMLLNDGEDPLALDYRFKELFR

SEQ ID NO: 74 - protein, 235 aa, Unknown
  Lactobacillus phage Lc-Nu
MQPIKHASAIDRTKNWRVLIYGKPGVGKTSAIRNLNGKTLVLDLDDSSKVLSGAPNIDVQPFDRSKPSEEWKEFLKNLAERVSGYDNLVIDNVSAFEKDWFVERGRASKNGIGNEIQDYGQWANYFARIMTMIFMDAPVNVLVTAWENTRDITSETGQSFSQYAPAIRDSVRDGLLGLTDVVGRVVVNPKTDGRGVILEGTDAIFAKNRLDNRKLVPINELFKFGNQEKSVKQED

SEQ ID NO: 75 - protein, 238 aa, Unknown
  Pseudomonas phage vB_Pae-Kakheti25
MQMSQLKPASQLARRYGVKSVVFGAPGSGKTPLINTAPRPVLLVTEPGMLSMRGSNVPAWEAYTPALMVEFFEWFMKSREAANFDTLGIDSISNIAEIILADELGKVKHGMKAYGNMSERVMKIANDLYYMPQKHIVMIAKQALVENGRQTILQNGEVTYEPIMQKRPFFPGKDLNVKVPHLFDNVMHLGEASVPGMPKPVRALRTKEIPEVFARDRLGNLNELEQPDLTALFAKAMQ

SEQ ID NO: 76 - protein, 216 aa, Unknown
  Escherichia phage Rtp
MQISELCKSILKALHTAKSLFAKAEKSKQNSHLKNKYATLEDVLAAVEPGLYECGLVMFQSVLDDEQTNRMKVETKLFHVESGEWVSFLMIVPISKNDAQGYGSALTYARRYGITAALGLSQADDDGNLAAKGVKDFKRELEKCNTLDELRNVWKEAKQSLDAAGWKVFEPHIIERKAEIEANAMTGFNPATPKKVAEKSSPEEKIKVESQQIDTF

SEQ ID NO: 77 - protein, 214 aa, Actinophage VWB
MIQTIAFDVGETLVSDDRYWASWADWLGAPRHTVSALVGAVVAQGRDNADALRLVRPGLDVAAEYAAREAAGRGEHLDDTDLYDDVRPALAALQALGVRVIIAGNQTIRAGELLRGLDLPVDVIATSGEWGCAKPTREFFDRVVDVAGTPRQSILYVGDHPANDTIPAAAAGLRTAHLRRGPWGHLWADDPQVRDTADWVIGSLHDLIDIVAGT

SEQ ID NO: 78 - protein, 254 aa, Paenibacillus alvei
MINGKTVEQVMAELAEPFPPEDIEWRVGSTNGGKTKGIALAYVTNRAIMNRLDSVVGAFNWQNNYREWKGHSQLCGIGIRFGEDWIWKWDGADDSQTEAVKGGLSDSMKRAGYQWGIGRYLYKLENVWVPIEPIGKSYRLAQTPKLPQWALPTGYTGQQTNTGNKTQRSTQKTQGKQENNSPSNNDGGSQQSSNDTGTQKRQMTEKQKQRWEVVRLLKAGGLDDAQAQAWIDKQKEQKRDYKTMLDICQRASKR

SEQ ID NO: 79 - protein, 261 aa, Unknown
  Listeria phage B054,Listeria monocytogenes
MMAKENYSDPNGKLLNSITTFEVNGEEVKLSGNIIRDYLVSGNAEVTDQEIIMFLQLCKYQKLNPFLNEAYLVKFKNTKGPDKPAQIIVSKEAFMKRAETHEQYDGFEAGVIVERGGEIIELEGAVSLASDKLLGGWAKVFRKDRNRPVSVRISEKEFNKRQSTWNTMPLTMMRKTAVVNAMREAFPDNLGAMYTEEEQGSLQNTETSVQQEIKQNANAEVLDIPSQQNEVPDFKEVREPEHVEMPPIYGEQQSTPPARPY

SEQ ID NO: 80 - protein, 211 aa, Unknown
  Mycobacterium phage Wildcat
MMRSSDNCADLLTALAKARTEIGPVEKSAQNPFFNSSYMTLDDIMDAVQPVLAKNGLSVSQWPDQSVNGEPALTTLLFHEPSGQYVQATATLVLGKKDPQAEGSAITYLRRYAYVSILGIKGVEPDDDGNYASQSDKKVTRTGKVADESNASAEVTRLRKELEVAAKAAGLTSAALAKGYHDRYGADYKRDNDETHLAAALTEMQLRVKSE

SEQ ID NO: 81 - protein, 164 aa, Unknown
  Rhodothermus phage RM378
MMNPEMKEILKKLMKPFHPDRHSYRVTGTFRTREGRNMGVVAFYISSRDVMDRLDAVVGPENWRDEYEVPAPGVMKCVLYLRIGGEWVGKSDVGTGNIENPESGWKGAASDALKRAAVKWGIGRYLYALPKCYVEVDDRKRIVNEEAVKSFLHKHVTELLKNYQ

SEQ ID NO: 82 - protein, 441 aa, Unknown
  Paenibacillus terrae (strain HPL-003)
MIQGTLFDNEHDRPLPNRVRPQSLEDFIGQKHLLGPGKVLQDMIKNDQVSSMIFWGPPGVGKTTLAKIIANQTKSKFIDFSAVTSGIKDIRNVMKEAEGNRQLGEKTLLFIDEIHRFNKAQQDAFLPYVEKGSIILIGATTENPSFEVNSALLSRSKVFVLHQLSSEDIVELLEKAILDPKGYGDQKIGFEDGVLSAIAEYSNGDARVALNTLEMAVLNGEKQGEAIEISKEGLLQIIHRKSLLYDKDGEEHYNIISALHKSMRNSDVNASIYWLSRMLESGEDPLFIARRLVRFASEDVGLADNRALEITVSVFQACQFIGMPECDVHLTQAVIYLTLAPKSNSAYLAYRYAKKDALHSMSEPVPLQLRNAPTKLMKELNYGKGYQYAHDTEEKLTRMQTMPDSLIGREYYHPTTQGSESKIKQRMEEIAAWYKQNNNQK

SEQ ID NO: 83 - protein, 252 aa, Unknown
  Listonella phage phiHSIC
MSVLSSITKPVDRPVIMTVLGEAGLGKTSLAATFPKPIFIRTEDGLQAIPEASRPDAFPMADTVESLMEQLGALVHEEHDYKTLVIDSVTQLETMFTQHVIDNDPKKPKSIQQANGGYGSGLSAVAALHGRVRKAAKMLNDKGMHIVFIAHADTETIELPDQDPYMRYSLRLGKKSMSHYVDNVDLVGLVKLQMFLKGDDDKRKKAISTGQRVITATTSASSVTKNRYGITQDLPCELGVNPFINHIPSLTE

SEQ ID NO: 84 - protein, 257 aa, Unknown
  Staphylococcus phage Pvl108
MSEEQDILQELGIEEINEDTQNYYSIMVYGKSGTGKTTLATRENNAFIIDIHEDGTQVTRQGFVKRVDNYIAFRNTITSIESIVNTARQRGKLLDVVVIETAQKLRDITLTHVMNTHQVKKARIQDYGETSKLIVNSIRHLLKVKDKLGFHVVLTGHEGLNSEDKDENGKIINPRISIEVQPAIHNNLVTQFDIIGHTFIEDHTDENGNATHNYVFSVEPSNLYTTKVRHNPQITINNPGIKNASISKIIDMAQNGN

SEQ ID NO: 85 - protein, 192 aa, Unknown
  Mycobacterium phage Hamulus, M. phage Dante, M. phage Ardmore, M. phage Llij, M. phage Drago, M. phage Phatniss, M. phage Spartacus, M. phage Boomer, M. phage SiSi, M. phage PMC, M. phage Ovechkin, M. phage Ramsey, M. phage Fruitloop, M. phage SG4
MSEPDVEGLAKLREPFPPNQIGKLPKGGITLDFLGHGYLTARFLDVDPLWTWEPFAVGDNGLPLLDEHGGLWIRLTLCGVTRIGYGDAGGKKGPNAVKEAIGDALRNAGMRFGAALDLWCKGDPDAPAPPDPAVAERNALLHELGDACAALTLDEKTVAAQFYGKYKVTARNAKPAQLREFIDDLMENGAPA

SEQ ID NO: 86 - protein, 252 aa, Unknown
  Bacillus subtilis subsp spizizenii (strain TU-B-10), Jeotgalibacillus marinus
MSEQNELMTKSVEFSVHGEPVKLTGKTVKNFLVRGNSDVTDQEAAMFINLCKYQKLNPFLNEAYLVKFKGSPAQMIVGKEAFMKRAENNEQFQGFKAGIIVEREGKMVDLEGAIKLSNDKLIGGWAEVYRADRQQPISVRISLEEFSKGQSTWKSMPLNMIRKTAIVNALREAFPNSLGNLYTEEEEQANDDILAEDRVRREVNENANTEIIDVNPILEPEPETTQAGQPEPQPIKRESQDKPSIFESGPDF

SEQ ID NO: 87 - protein, 312 aa, Unknown
  Paenibacillus lactis 154
MSSQQLALVKRDTVDVVADKVRQFQERGEIHFPANYSPENAMKSAWLLLQTVQTKDYKPALEVCSRDSIANALLDMVVQGLNPAKKQGYFIVYGKTLTFQRSYFGTMAVTKRVTGAEDIDAQIIYEGDEFEFEIVRGRKKITKHKPSFSNMDDSKIAGAYCTIYWPDGREYTEVMTMKEIRQAWKKSKQNPDKENSTHNEFPGEMAKRTVINRTCKTYMNTSDDGSLIMKHFKRQDEVLAEAEVEAEIAANANGEVIDITPPATTEAEPEPEQPKETTRSSKSNVELAGQGEMDFEIHPDDIPPFGTEGPDF

SEQ ID NO: 88 - protein, 263 aa, Pediococcus acidilactici
MSNELMTKAVTYEVNNEEVKLSGQIVKQYLTSGQAVTDQEVTMFIQLCRYQHLNPFLNEAYLVKFNGKPAQIITSKEAFMKRAESNPNYAGLKAGCIVERNGELIYTEGAFTLKTDNILGAWADVIRKDRREPTHVEISMDEFSKSQATWKSMPATMIRKTAIVNALREAFPQDLGALYTEDDKNPNEATQTTYKQEPEVNTTKTADVLAKKFSGAPQIKSVENVQESEEESNNASNHGEATEPVNNVEEPTATAEVEQGQLL

SEQ ID NO: 89 - protein, 201 aa, Bacteriophage HK022
MSKEFYARLAAIQENLNAPKNQYNSFGKYKYRSCEDILEGVKPLLNGLFLSISDEVVLIGDRYYVKATATITDGENSHTATALAREEESKKGMDSAQVTGATSSYARKYCLNGLFGIDDAKDADTDEHKHQQNAAAKQSNPSPTPEQVLKAFTDAAMQKNTVEELKQAFAKAWKMLEGTPEQHKAQDVYNIRRDELEGAAA

SEQ ID NO: 90 - protein, 418 aa, Homo sapiens
MSGTEEAILGGRDSHPAAGGGSVLCFGQCQYTAEEYQAIQKALRQRLGPEYISSRMAGGGQKVCYIEGHRVINLANEMFGYNGWAHSITQQNVDFVDLNNGKFYVGVCAFVRVQLKDGSYHEDVGYGVSEGLKSKALSLEKARKEAVTDGLKRALRSFGNALGNCILDKDYLRSLNKLPRQLPLEVDLTKAKRQDLEPSVEEARYNSCRPNMALGHPQLQQVTSPSRPSHAVIPADQDCSSRSLSSSAVESEATHQRKLRQKQLQQQFRERMEKQQVRVSTPSAEKSEAAPPAPPVTHSTPVTVSEPLLEKDFLAGVTQELIKTLEDNSEKWAVTPDAGDGVVKPSSRADPAQTSDTLALNNQMVTQNRTPHSVCHQKPQAKSGSWDLQTYSADQRTTGNWESHRKSQDMKKRKYDPS

SEQ ID NO: 91 - protein, 285 aa, Burkholderia cepacia
MSDVITTNQDTAPGAFDLSPRSLEQAMQLANILADSSIVPKDFIGKPGNVLVAIQWGMELGLKPMQAMQNIAVINGRPSLWGDALLALVLASPVCEYVHEWEENGTAFIKVKRRGKPEDVQSFGDEDAKKAGLIGKQGPWAQYPQRMKKMRARAFALRDNFADVLKGIAVAEEVMDIEPVERDITPRATAAQIAHSAADSSRPARTERHDEIVKKLEDVARNLGFEPFKEEWTKLSRDDRAALGLRERDRIAAIAGAPVVHQQTDGAPQDDGHGAGQREPGGDDE

SEQ ID NO: 92 - protein, 306 aa, Photorhabdus luminescens
MSTAVQKVYEIINPLKTEFEQICSEPGIVFKRESEFAMQIFANNDFLATTALNNPVSARSAVMNIAAIGISLNPAQKLAYLVPRNKSVCLDISYMGLMHIAQQSGAIKWCQSAVVRKNDIFKRTSIDTAPIHEYNEFDTAQSRGDIVGAYTVIKTDDCDYITHTMRASAIFDIRDRSSAWIAYKTKGKSCPWVTDEEQMILKTVVKQAAKYWPRRERLDKAIDYVNTEAGEGIDFSKGQNSYIDVTPAADSTIESITNLLTTMNKTWDDDLLPLCSKIFRRQILSPAELTESEAIKASDFLRKKAS

SEQ ID NO: 93 - protein, 261 aa, Unknown
  Bacillus thuringiensis Sbt003,Escherichia coli \'BL21-Gold(DE3)pLysS AG\',Enterobacteria phage HK630,Enterobacteria phage lambda (Bacteriophage lambda),Escherichia coli TA280,Escherichia coli
MSTALATLAGKLAERVGMDSVDPQELITTLRQTAFKGDASDAQFIALLIVANQYGLNPWTKEIYAFPDKQNGIVPVVGVDGWSRIINENQQFDGMDFEQDNESCTCRIYRKDRNHPICVTEWMDECRREPFKTREGREITGPWQSHPKRMLRHKAMIQCARLAFGFAGIYDKDEAERIVENTAYTAERQPERDITPVNDETMQEINTLLIALDKTWDDDLLPLCSQIFRRDIRASSELTQAEAVKALGFLKQKAAEQKVAA

SEQ ID NO: 94 - protein, 271 aa, Bacteriophage A118
MSTNDELKNKLANKQNGGQVASAQSLGLKGLLEAPTMRKKFESVLDKKAPQFLTSLLNLYNGDDYLQKTDPMTVVTSAMVAATLDLPIDKNLGYAWIVPYKGRAQFQLGYKGYIQLALRTGQYKSINVIEVRDGELLKWNRLTEEIELDLDNNTSEKVIGYCGYFQLINGFEKTVYWTRKEIEAHKKKFSKSDFGWKKDYDAMAKKTVLRNMLSKWGILSIDMQTAVTEDEAEPRERKDVTEDESIPDIIDAPITPSDTLEAGSEVQGSMI

SEQ ID NO: 95 - protein, 224 aa, Unknown
  Streptococcus pyogenes serotype M28 (strain MGAS6180),Streptococcus pyogenes, Temperate phage phiNIH11,Streptococcus pyogenes serotype M2 (strain MGAS10270),Streptococcus pyogenes serotype M3 (strain ATCC
MRKSESITEYAKAFCKAQLEVKQPLKDKDNPFFKSKYVPLENVTEAITKAFANNGISFSQDPTTNAENGYIDVATLVMHTSGEWVEYGPLSVKPTKNDVQGAGSAITYAKRYALSAIFGITSDQDDDGNEASKPNKTNQSQKPTNKTSKGASFQTPKISNIQVETYKSDLSDIAKATNQNVEELTKWLTDTLKVKTLEDLRTEQIVSTDNLINKLKKKAEQKND

SEQ ID NO: 96 - protein, 259 aa, Unknown
  Staphylococcus phage phi11 (Bacteriophage phi-11),Staphylococcus phage 80,Staphylococcus phage 52A,Staphylococcus aureus (strain NCTC 8325)
MTEKTNQDVDILTQLGVKDISKQNANKFYKFAIYGKFGTGKTTFLTKDNNALVLDINEDGTTVTEDGAVVQIKNYKHFSAVIKMLPKIIEQLRENGKQIDVVVIETIQKLRDITMDDIMDGKSKKPTFNDWGECATRIVSIYRYISKLQEHYQFHLAISGHEGINKDKDDEGSTINPTITIEAQDQIKKAVISQSDVLARMTIEEHEQDGEKTYQYVLNAEPSNLFETKIRHSSNIKINNKRFINPSINDVVQAIRNGN

SEQ ID NO: 97 - protein, 756 aa, Unknown
  Pseudomonas aeruginosa, Pseudomonas aeruginosa DHS01,Pseudomonas phage LKA5,Pseudomonas phage F116
ATGACTAACATGAATTCAAATATGGCTATCTGGGATCAAGTGAAAGAGACAGATACCAGATATACCAGACAAGCTAAGCTCAATGGCCAGGACATGACATCCATCAACGGACTCTATATAGTTCGCCGCGCTACAGAATTATTTGGTCCAGTTGGCAAAGGTTGGGGTTGGAAAGTCCTCGTAGAACGTTTTGACGAAGGGGCCCCGCATTTAGACAAGAATGGTGCGGTTATTTGTCACGATAAAACACATACCTTGTATATAGAATTGTGGTACCGTCATGATGGAACAATTAACCATGCTAGGCAGTATGGGCATACCCCGTACGTCTATAAAACTGAGTGGGGTTTCAAAACGGATCACGATTATGGGAAAAAATCGCTCACAGATGCGATTAAAAAGTGCCTGAGTTTGCTCGGTTTTTCTGCGGATATCCACATGGGTATGTTCGACGATACAACGTATGTTGAGGGTCTGAAATTAAAAGAGAGATTAGCTGATGCTGGTGATCCGGAGACTGCTTTAGATGAAGCCAAAGACGAGTTTAAAACTTGGCTTCGTGCCCAGTTAGATGCCATTGCTGCTGCTCCGAATAGCCGTGCTTTAGAACTAATGCGCAAACAGGTGGCCGAAAAAGCTAGAGCCAAAGCCCCTGTAGTTAATTTCAATCCGAGCGAAATTGAGCTGAGAGTGAATGAGGCGGCGGATGAGAGGCTAAGACAGCTATCTCCCGCCCCGACGAGCCCGGAAGAGTAA

SEQ ID NO: 98 - protein, 208 aa, Unknown
  Staphylococcus phage CNPH82
MTEETLFNQLNQKDVNDHVEKKNGLTYLAWSYAHQELKKIDSNYSIKTHEFVHPDVPQDNYFVPYLATPEGYFVQVSVTVKGQTETEWLPVLDFRNKSLAKGSATTFDINKAQKRCFVKAAALHGLGLYIYNGEEVPSANDNDITELEERINQFVTLSQEKGRDATLDKTMRWLGIQNINKVTKKDIANAHQKLDAGLKQLDKENSND

SEQ ID NO: 99 - protein, 187 aa, Unknown
  Streptococcus pyogenes STAB902,Streptococcus pyogenes, Streptococcus pyogenes serotype M3 (strain ATCC BAA-595 / MGAS315)
MTTTPNTTKVVTGKVRLSYVALLEPKAFEGQEAKYSTVILIPKTDKVTIKKIKDAQKAAYEAAKDNKLKGVKWERVKTTLRDGDEEMDTEEHPEYTGHMFMSVSSKTKPQIIDKYKNFVDSAEEVYSGVYARVSLNAYAYNTAGNKGISCGLNNVQIVAKGDYLGGRSSADADFDEWNEEEDEDDIL

SEQ ID NO: 100 - protein, 103 aa, Paenibacillus curdlanolyticus
MTNMQHMMKQVKKMQEQMLKAQEELGTKTIEGSAGGGVVNVKVNGHKQVLSITIKPEVVDPEDIEMLQDLVITAVNDALAKAEEMANEDMGKYTGGMKIPGLF

SEQ ID NO: 101 - protein, 250 aa, Unknown
  Streptococcus phage V22,Streptococcus pneumoniae
MTNNQLATQTKRNITTDPSLLTGADIKKYFDPQNLLTEKQVGQALALCKGRNLNPFANEVYIVAYTNRNGGKEFSLIVSKEAFLKRAAQCKDYEGFEAGVVVVDSEGVMHERKGAIMLPEDTLIGGWARVHRKNFKVPVEIFVSREEYDKKQSTWNTMPATMIRKVALVNALREAFPEDLGNMYTEDDGGETFDRIKDVTPQESREDVVARKMAEIEQFNKEQEANHADPEPAQNEDPIQGELLDGELEY

SEQ ID NO: 102 - protein, 319 aa, Unknown
  Cyanophage PSS2
MTEQHAQRWDERTKKIVFATVAKDVRSEADKAHFEHLCTSKGLDPLAKEIWCVARGGKPTFMLSIDGFLKLANSTGMLDGIDIEFFDADGKGSEVWVSSKPPAACVARAYRKNCSRPFSASCRFDAYAQNSPLWKKLPEVMLSKVATTLALRRGFSDVLSGLHSPEEMDQAGMAPAEALAPSAPAAPAPVVNPPAEKPRKRMAPVEPVHEVIDRPTDDLHHGGVTEVQKNVAPKAVAVMEKPVEEGLPARDDLKGAISKLYEVARAKGLTVKGWESLGLQMGGLTPGSAAKFLTPMSSISEEKVGYLNSGKSTTGEALR

SEQ ID NO: 103 - protein, 285 aa, Vibrio cholerae
MTQVIPFEQQYPLVAQRGIDEATWSALQNSVYPGAKPESILMVVDYCRARSLDPILKPVHIVPMSVKNSQTNQNEWRDVVMPGIGMYRIQADRSKTYAGSTEPEFGPPITMEFHGEGNAKETITFPEWCKITVYKLINGSPVAFSAKEMWLENYATAGRNSQIPNAMWKKRQYAQLAKCTEAQALRKAWPEIGQQATAEEMEGKELIIEHDITPAKKSAPQIQQYPQDDFDKNFPAWEKKIKLGTNTPERIIAMVQSRGQLTDEMKQRLFDASAINGELSHANSN

SEQ ID NO: 104 - protein, 252 aa, Haemophilus paraphrohaemolyticus
MTTALNTLTQKLAERFEMGSSENLPQTLMATAFKGQNVTPDQMVALLVVANQYELNPWTNEIYAFPNKEGIIPIVGVDGWYAIINKHPQFDGIEFEQDAESCTCRIYRKDRQRPTVVTEYLDECKRETDPWRKYPKRMLRHKAAIQCARVAFSLSGIYEPDEAERIQESDKTSQNITPEKSATTGNPTHPEFEALVFTLEEEAKKGTSHLETYWKTTLTKEQRQIVGVNEITRIKEKAKQYDNIQEAEYEEA

SEQ ID NO: 105 - protein, 263 aa, Unknown
  Bartonella schoenbuchensis (strain DSM 13525 / NCTC 13165 / R1)
MTTSIVATVAQKYGLSEQEFCKKIIKNCINFNISKEDFEDFVYLADGYKLNPLRKEIYAVPKRGGGIDAVVGIKGWYKLIRSQDDYDGIDIIYQHDNNGKLHAAQCIIYLKSKKYPIKFTEFLEECRRDTEHWRKSSSRMLCYKAITQCARLAFGFDDIYDEDEVDCIDEAFISEVNHNPQNERVSDEVLAQIRELMEQTKTEEKKVLSFAKVASLTEMSHETGQIILEGLKERQRFQMEEEQQTLPSPKQPHTPTQQDLPGV

SEQ ID NO: 106 - protein, 153 aa, Unknown
  Phormidium phage Pf-WMP3
MTNNITPDFIKAFVKVQSELPAIPKSSTNPHFKSKFASLDTFNELVLPVLHTYGFTLMQPCSVENDNAVIDTYLMHESGGYVVSRYLIGFDDNPQKQGARVTYGRRYAAFAILGVVGDEDDDGNSAVGLSGTKQTSAEPVATLKRSGGLRKLQ

SEQ ID NO: 107 - protein, 206 aa, Unknown
  Simkania negevensis (strain ATCC VR-1471 / Z)
MTVQLVQPRNSDEYDFDQTKLDLIKRTICKGATNDELQLFIHACKRTGLDPFMRQIFAVKRWDSSTKKEIMTIQTGIDGYRLIADRTGKYAPGKDTEFGYDNKGNIRWAKAYIKKMTPDGQWHEISAIAFWEEYVQTTREGKSTLFWLKKSHIMLSKCTEALALRKTFPAERSGIYTKEEMAQEFSPLEEHLVERIAASRNDQGRS

SEQ ID NO: 108 - protein, 267 aa, Unknown
  Lactobacillus phage KC5a,Lactobacillus phage phi jlb1
MTDKKKSVYETLAKVDVKPLLEKKGNLNYLSWAKAWGLVKSLYPDATYQIKEFPEYVLTKESWLATGRNVDYRQTIAGTEVEVTVTIEDQSYSSKLYVMDYRNKVIAKPTYFEINKTQMRCLVKALAFAGLGLDVYAGEDLPEQPQRKQTVPKPAQKPARRQATLSKPKKMTKDQLYGYQADYNGEKKFLVTIYTECDKQKKMGLDAKTSVPIEWWHEKLKENSADGEAVRQFTEMAIAANKKKQANGIPDYAKDPEVEKAIEDAIS

SEQ ID NO: 109 - protein, 191 aa, Unknown
  Thermus phage phiYS40
MTEKEIRIELMRPFPDQAILFRVDKKLKNGSYLIVPYLDVRYIIHRLNTMIPGDWELKTEITPITVETTDKSGFLIVGHMAKAELTIMGKTMTGTGSSYLVFDNDLEKLKKQFIKADPKSAETDAIRRAAANHSIGLYIWFFKNQIFATEEELKNRNSKPIQEALANLRIIGDKLYRQAKEYALGKRGGAE

SEQ ID NO: 110 - protein, 243 aa, Streptococcus gallolyticus
MTTNEITQQKGGYLTDLQQLDGATLRNFVDPKHQASPQELQTLLAIVKNRNLNPFTKEVYFIKYGNNPAQIVVSKDAFMKRAEQNPNYDGFESGVIYENQTGELKSKKGVILPKNCKLVGGWCEVYRKDRSRPVYREVELSAYNTGKNWWGKAPGQMIEKVAIVAAVRDTFSEDVGGLYTTDEMEQAAPIDVTPQETQEDVIARKQAQIENWQNQKAQQEEAQAEPAQEEQTELLDENGELVY

SEQ ID NO: 111 - protein, 271 aa, Acinetobacter radioresistens
MNAVTQVENQLGLSLKDYDVDQAMWSALTSSIFPGAKPESIVMAVEYCKARNLDIMKKPCHIVPMSVKDAKTGNSDWRDVIMPSIAEHRITASRSHSYAGIDAPVFGPMVNISFGGVSHTVPEFCTVTVYRIIHGEKVAFAHTEYFEEACATVKGGGLNSMWTKRKRGQLAKCAEAGALRKAFPEEIGDGYTKEEMEGKIITVGGTEHIQEEAKAIEDIRPTLTEKQIETAIKKIKANQGSLDALKAHYNITPEQENYVRAQTEVLEHDPV

SEQ ID NO: 112 - protein, 287 aa, Unknown
  Acinetobacter sp P8-3-8
MNAPIQHSTIVTAQITQMADLLGLGNVDPVELKNTLIATAFNNGDKEISDAQMASLLIVAGQYKLNPWTKEIYAFPDKNKGIIPVVGVDGWSRIVNSSPNFDGLEFKYSENMVTMEGAKVAAPEWVDCIIYRKDRERPTVVREYLAECYRPPFKGKYGDVVGPWQSHPSRFLRHKATIQCARLAFGFVGIYDQDEAERIQDGGTVRTVQGETGDLIPDGYQEFEEAHLNNMRELAFEGMEALETGYAELPKGKCRSHFWTMHKESLKAAAQKADQPQGEVYEHSPAE

SEQ ID NO: 113 - protein, 254 aa, Unknown
  Lactobacillus ruminis SPM0211
MNQLQKQQTRSITFKANGDDVTLSPSIVRDYLVRGNSKEVTGQEIAMFLNLCKFQHLNPFLNEAFIVKFGDKPAQLITSKEAFMKRAESHPQYNGLKAGVIVVNNNGVEFRNGAFTVPDFDQLVGGWCEVYRKDRDIPVRVEISLSEFSKGQSTWKTMPATMIRKTAIVNALREAFPETLGALYTEDDDGQMQMQQTKKQVQATENSKAKNKADALIAQAMDPEHVQQQETEEFQREPRPVDLFNPAEEYSKGE

SEQ ID NO: 114 - protein, 232 aa, Unknown
  Bacillus phage 0305phi8-36
MNINECFQVSHYEVDKNLRKLIDEPVNEDLIDKNKYANNSEFVPDSIYKRVLNKATNYQWSFVPYDISTVEGKYVQFIGLLIVPGYGVHTGIGTQKLQKTDNSNALSAAKTYAFKNACKEMGIAPNVGNDDFDEALFENFDDDEIEVEEKPKKKPVKKEEKKPAKKPAKKEAKPLKERIEEIRQAYELDDDDFVAFIQIWDENIIDLKDMDDKKWKAFLQDVEENPEEYEDF

SEQ ID NO: 115 - protein, 212 aa, Unknown
  Staphylococcus phage 92
MNKSETVVEINKAMVAFRKEVKQPLKDKNNPFFKSKYVPLENVVEAIDEAATPHGLSYTQWALNDVDGRVGVATMLMHESGEYIEYDPVFMNAEKNTPQGAGSLISYLKRYSLSAIFGITSDQDDDGNEASGKNNNPKQQTRTQWASSETIGILRKEVIDFTKLIKGTDKEAPQNIVEQKFDINNYKLTEKQAAEAIQKIRNNTKTVTGGKQ

SEQ ID NO: 116 - protein, 220 aa, Bacteriophage phig1e
MKFYEDGNIPEIPNMYFIYGDGGTGKTSVVKQFVGHKLLFSFDMSSNVLIGDKDVDVIMFEHRDMPNIQAMVEQYVMQGIQDVKYRIIVLDNITALQNLVLENIDDAAKDNRQNYQKLQLWFRDLGTILKESGKTVYATAHQLDNGSSGLSGEGRYQADMNEKTFNAFTSMFDLVGRIYLTGGERMIDLDPEKGNHAKNRIDGRKLIKANELIQTSKGAK

SEQ ID NO: 117 - protein, 216 aa, Unknown
  Bacillus phage 0305phi8-36
MKSRELTPEFKKEFIMKIGGPKGKEAILYNGLLALAHEDPRFGHIEAYVTQYPSSENKFTCYARAEIFDKEGKRIGMEEADASVNNCGKMTAASFPRMALTRAKGRAFRDFLNVGMVTADELQAYEPDLASVDSIGKIKRLGKKLGFSRTQLEDFLYDNIGTDKMNELTEPEAQEIIDAMNAELADQEPDEEVEEKPARKKRPAKKKSASVDDEDF

SEQ ID NO: 118 - protein, 185 aa, Unknown
  Staphylococcus phage 3A,Staphylococcus phage phi7401PVL,Streptococcus pneumoniae, Staphylococcus aureus (strain NCTC 8325),Staphylococcus phage Phi12,Staphylococcus aureus, Staphylococcus phage 47,Staphylococcus phage tp310-2
MKAKVLNKTKVITGKVRASYAHIFEPHSMQEGQEAKYSISLIIPKSDTSTIKAIEQAIEAAKEEGKVSKFGGKVPANLKLPLRDGDTEREDDVNYQDAYFINASSKQAPGIIDQNKIRLTDSGTIVSGDYIRASINLFPFNTNGNKGIAVGLNNIQLVEKGEPLGGASAAEDDFDELDTDDEDFL

SEQ ID NO: 119 - protein, 179 aa, Unknown
  Flavobacterium phage 11b
MKEIATALVKAQKEMTTPKKGSVNPFFKNKYADLNDVLAAIVPALNNNGIVLLQPLVNIEGKNFVKTVLMHESGEVFESLAEIFCNKNNDAQAYGSGVSYARRYSLSSICGIGSEDDDAHTAVNTKPKAVPVVLTLTDAVIDSVIAKGIDTIKSCLESIKNGSRIATQVQILKLENGSK

SEQ ID NO: 120 - protein, 184 aa, Unknown
  Acyrthosiphon pisum secondary endosymbiont phage 1 (BacteriophageAPSE-1)
MKIKLNNVRLAFPELFEPTQVSGQGAFKYRANFLIPKSRTDLIEEIKAGIKHVIGEKWGNKDIEKIYNSICNNPNRFCLRDGDSKEYDGYAGNLYLSASNKSRPLVIDRNTSPLTAQDGRPYSGCYVNATVEFYGYDNNGKGVSASLRGVQFFRDGDAFTGGGVASVEEFDDLSMAEEEELLAS

SEQ ID NO: 121 - protein, 226 aa, Unknown
  Streptococcus phage A25, Streptococcus pyogenes, S. pyogenes serotype M2 (MGAS10270), S. pyogenes serotype M4 (MGAS10750), S. pyogenes serotype M3 (ATCC BAA-595/MGAS315), S. pyogenes GA06023, S. pyogenes STAB902
MKITKATEIKNNDSCYLIYGNPGFGKTSTAKYLPGKTIVINIDKSAKVLRGNENIDIADIDTHKIWGEWLDTVKELLNGAANDYDNIVIDNVSELFRACLANLGREGKNHRVPSQADYQRVDFTILDSLRALLQLNKRIVFLAWETSDQWTDENGMIYNRAMPDIRTKILNNFLGLTDVVARLVKKTTDDGEEVRGFILQPSASVYAKNRLDDRKGCKVEELFETT

SEQ ID NO: 122 - protein, 189 aa, Unknown
  Prochlorococcus phage P-SSP7
MKNIHVTKEPVTLEGYQAILKPSKFGYSLKAVVGSDIVDALETERADCLKWAESKLKNPKRATLKPTPWEEVEEGKFIVKFSWAEDKRPPVVDTEGTPITNEDVPVYEGSKVKIGFHQKPYILRDGVTYGTSLKLSGIQVVSIQSGAGVDTGDLDQDGVAELFGKTQGFKADDPNVTPAEEAPVPDDDF

SEQ ID NO: 123 - protein, 224 aa, Unknown
  Lactobacillus phage phijl1
MKKIVNFTDGANIFVVLGQVGSGKTHLTLGHKGKKLVISFDGSYSTLEGHEDEMTVVEPEITDYGNPDKLVSEIDDLAKGCDLVVFDNISAVETSLVDAITDGKLGNNTDGRAAYGVVQKLMAKFARWAIHFNGDVLFTLWSEVTEEGKEKPAMNAKAFNSVAGYAKLVSRTETGFDGYTVVVNPDNRGVIKNRLADKIKKQSIKNDDYWKAVEFAKGSKHENA

SEQ ID NO: 124 - protein, 286 aa, Unknown
  Komagataeibacter oboediens
MNALTVQGHTPAIQITSFEQLVKFADIASRSGMVPSAYSGKPQAVLIAVQMGSELGLAPMQSLQNIAVINGRPSVWGDALLGLVKASAVCDDVVETMEGEGDALTAICVAKRKGKSPVEARFSVEDAKAAGLWNKQGPWKQYPKRMLQMRARGFALRDAFPDVLRGLITAEEAGDIPQDDFRSSVSGQRPVDVTPQVRHVEQERAPNYIAYFESKLADCRNTTSVDALWKQWNDRIEKAHSAGRPIAQETIERVQEMMGERMGEVEQAERQQTEELAAAPVEEPVA

SEQ ID NO: 125 - protein, 471 aa, Saccharomyces cerevisiae
MNEIMDMDEKKPVFGNHSEDIQTKLDKKLGPEYISKRVGFGTSRIAYIEGWRVINLANQIFGYNGWSTEVKSVVIDFLDERQGKFSIGCTAIVRVTLTSGTYREDIGYGTVENERRKPAAFERAKKSAVTDALKRSLRGFGNALGNCLYDKDFLAKIDKVKFDPPDFDENNLFRPTDEISESSRTNTLHENQEQQQYPNKRRQLTKVTNTNPDSTKNLVKIENTVSRGTPMMAAPAEANSKNSSNKDTDLKSLDASKQDQDDLLDDSLMFSDDFQDDDLINMGNTNSNVLTTEKDPVVAKQSPTASSNPEAEQITFVTAKAATSVQNERYIGEESIFDPKYQAQSIRHTVDQTTSKHIPASVLKDKTMTTARDSVYEKFAPKGKQLSMKNNDKELGPHMLEGAGNQVPRETTPIKTNATAFPPAAAPRFAPPSKVVHPNGNGAVPAVPQQRSTRREVGRPKINPLHARKPT

SEQ ID NO: 126 - protein, 247 aa, Clostridium botulinum
MNENKELTEQQGANIANDLDTFGSIKGFENTCRMAKALASSTIVPKEYHDNIGNCLIALDVANRVGLSPIMVMQNLYVVNGRPAWGSQSISALINTSKKYAKPLQYKIDGSGDELSCYAYTFDHEENEIKGPVITIKMAKEEGWINKSGSKWKTMPEVMIRYRAASFFGRLHCSELLLGIYSADEAVELEPATVIEVTHEEVKQEIKENANQEIIDIQIEEVKEDDKEKSKNENPTVKQTVVKTEPF

SEQ ID NO: 127 - protein, 199 aa, Campylobacter coli
MNTKITNTQNQAVSTSFTQEKIELIRKHFFPVNAKTVEMEYCLNIANKYNLDPFLKQIFFVPRRSQVEVNGKKEWVDKIDPLVGRDGFLAIAHKTGKFGGIRSYSEIKQFPRLNDNGKWEYIQDLVAVCEVHRTDSDKPFVVEVAYNEYVQKKASGEATSFWTTKPDTMLKKVAESQALRKAFNLSGLYSAEEMGVGMT

SEQ ID NO: 128 - protein, 284 aa, Helicobacter pullorum
MNKEIINKENNQVALADAENLAFIKKQFFPVNATEKDIEFCLKVAQAYSLNPVLREIFFVERMANVNGAWVVKVEPLVSRDGLLSIAHKSGKLSGIKSESFLKETPVLINGEWEIKKDLCAVANVYRTDTKEVFSAEVFYSEYAQKTKEGKITKFWAEKPHTMLKKVAESQALRKAFNINGIYTPEELDGIKSVGGDVKTLSGVDLEVEADIDEPEIFYELDSTPAEADSEKKAVEALGLSVEEKNGYLKIMGNTYKKEAHIKALGYTLHKASSGENIWIKKLA

SEQ ID NO: 129 - protein, 220 aa, Unknown
  Escherichia phage Tls
MKFSEQNANVIKALFEARQLFTKVKKDKQNTHLKNKYATLDSVLDAIMPGLTDKGLFLTQDQKVGEDLKSMTVLTRFIHVESNEWVEYSFTLPMQKLDPQGGGSTNSYARRYALCTALGLATADDDANLATKNAQDWKKDLDACDNLTDLQETFKTAYKQSDAANRRIIKEHYDKLKAKMEIGKARGFNPAEPAANVAKNEKVEKEPQQEVKSQSITDFE

SEQ ID NO: 130 - protein, 182 aa, Bordetella bronchiseptica
MKLKLNNVRLAFPVLFEAKTVNGEGKPAFSASFLIDPSDAQVKALNQAIEQVAKEKWGAKADAVLKQMRAQDKVCLHDGDLKANYDGFPGNLYVSARSATRPLVIDKDRSPLAEADGKPYAGCYVNASIELWAQDNNYGKRVNAGLRGVQFLRDGDAFAGGGVASEDEFDDITEGAAAADLV

SEQ ID NO: 131 - protein, 178 aa, Bacteriophage LL-H
MKMQHSDSIKEIFGALSKFRAQVKQPAKTANNPYFNSKYVTLEGVMQAIDAALPGTGLAYSQLVENGDNGASVSTLITHSSGEWMIVGPLTLNPTKRDPQGQGSAITYAKRYQLASAFGISSDIDDDGNAGTFGEDSRWQSGYQRSRPKTTHTEAKTLTKAITLASSLAHHSKPKSGP

SEQ ID NO: 132 - protein, 219 aa, Bacteriophage A500
MKMSESVLELSVALSKFQEKVEQPAKTANNPFFKSSYVPLENVISAVKKHAPDLGLSYIQIPLTEENKVGVKTILMHSSGEFVEFDPFMLPLDKNTAQGAGSALTYARRYTLSSAFGIASDEDDDGNGASGNTKANKSSKNYQQTKQTQPTQQSDNLASPAQRKAIFAKASVVGDPFGHDAKYVLESYKITDTKSMSKGEASALIKKLDAEIEAQKQVN

SEQ ID NO: 133 - protein, 237 aa, Acinetobacter radioresistens
TTKEWKWNERARKSLPEEKVHTVKLRNITCKAWAIETATGERLESAEISMEMAVKEGWYQKNGSKWQTMPEQMLRYRAASFFGRIYAPEVLMGIRTQEEEQDAIIDVTPEPVQQTSPVTTSDLKANVVKEAPVEQQAKQQPVQEEKKPRARKQPKVIETENVQNSTENEVVDAELTVEDLKRLQQEAENLIQQNKTSETAQVDVNKFAEIKKSYMKTLTSTVQASSINGLKSQIEKE

SEQ ID NO: 134 - protein, 312 aa, Unknown
  Streptomyces longwoodensis
MSLTTLKERVQQRAAAASSDGIPPGQADEDTPAGRDHDAEQFRADIAAALPAHVSVDRFLAVLRPVLPGLRKCTPASVRQAVITAARFGLLPDGEEAVITADDGIATFLATYHGYIELMWRSGMVKSIVAKVVYDGDEWDYVPTAPVGQDFTHRPKLGSPKDRTPLFAYTFAWLDGGARSDVAIVTVEEAEAIRDEFSKAYQRAEANGQKNSLWHTRFPDMLLKTAIRRAAKLLPKSAELRALVAVERAADEGHTQILAALTPEALALEAEARAAARAAEASQDVPPPRLPVKRGRARPRRRHRDKNKATRR

SEQ ID NO: 135 - protein, 272 aa, Streptomyces albus
MSQISNALATRDQGPAAQIEQYRDEYAALVPSHVNADQWVRLAVGAVRGDEKLMEAAQNDIGLFLREMKTAARLGLEPGTEQFYLTPRKSKPHGGRKVIKGIVGYQGIVELIYRAGAASTVIVEAVRENDTFRYVPGRDDRPVHEIDWFANDRGPLVGVYAYAVMKDGAVSKVVVLNRSRVMEFKAKSDSKHSEYSPWNTNEEAMWLKSAVRQLAKWVPTSAEYRRDQLLAHTETADSVVASVSTAPLPPQPSALDDADPDDDGPIDAELVD

SEQ ID NO: 136 - protein, 267 aa, Streptomyces noursei
MTSPIRAAVARRAGDPAALISQYTADFAAVLPSHIKPATFVRLAQGILRRDEKLAQAAANDPGQFMSVLLDAARLGLEPGTEAYYLVPFKGRVQGIVGWQGEIELMYRAGAISSVIVETVREDDVFVWTPGLVDRETPPRWEGPMSYPFHEVEWAGDRGPLRLVYAYAVMKGGATSKVVVLNAQDIERAKKTSQGADSPSSPWRQHEAAMWSKTAVHRLAKYVPTSAEYITAQVRAVRQADALSAPPVEEVVDVELVGDGQEQEARR

SEQ ID NO: 137 - protein, 315 aa, Unknown
  Streptomyces albulus
MNNPSEEPSVDGAPTAQRPGGENASPDQAVTPSAIILRAEQTEFDHRQRMALALISPELKKASRPELAVFFHHCVRSGLDPFARQIYMIGRKNKGRDREENPITWTIQTGIDGFRTIAHRAAERTGERISYEDTVYYAADGTTSDVWLADEPPAAVKVTVLRGTSRFPLVARWAEFAPEHWDNKQGKYVVAAMWKQMPAHMLRKCAEAGSLRMAAPQDLSGVYADEEMEQADAEVVAGEAKEASSRLRAAAGLDDAHSEAESNAEVEEPEAPTPKKSRPKPATEASTQSEGSKRPRKRTAGKRAANKAADSGAGG

SEQ ID NO: 138 - protein, 271 aa, Streptomyces rimosus
MSQISNAIATRDTGPAAQIEQYRDEYAALVPSHINADQWIRLAVGAIRGNKDLEKAARTDVGIFLRELKTAARLGLEPGTEQFYLTPRKSKAHGYALIIKGIVGYQGIVELIYRAGAVSSVIVETVREHDTFSYVPGRDERPVHEIDWFGADRGALVGVYAYAVMKDGATSKVVVLNRARVMEIKAKSDSKDSEYSPWKTSEEAMWLKSAVRQLAKWVPTSAEYMREQLRAQAEVAAETPSVASAPLPPQPSALDDYDPADDGPIEGELVD

SEQ ID NO: 139 - protein, 272 aa, Unknown
  Streptomyces cyaneogriseus subsp noncyanogenus
MSQIGNAIEKRDQGPAAQIEQYRDEYAALVPSHVNADQWIRLAVGAIRGNKDLEQAARNDVGVFLRELKTAARLGLEPGTEQFYLTPRKSKAHGYKLIIKGIVGYQGIVELIYRAGAVSTVIVKAVRERDTFRYVPGRDDRPIHEIDWFGTDRGPLVGVYAYAVMKDGAVSKVVVLNRTRVMEIRAKSDSKDSEYSPWQTNEEAMWLKSAVRQLAKWVPTSAEYMREQLRAQAEVAGELAAPSVMGAPAMPQPSVLDDTDPDDEPIDGELVD

SEQ ID NO: 140 - protein, 277 aa, Unknown
  Streptomyces sp HPH0547
MSSQISNAIATRDNGPTAQLKQYRDEYAALVPSHINLDQWIRLATGALRGDEKLMEAAQNDVGVYLREMKTAARLGLEPGTEQFYLTPRKSKAHDGRPIIKGIVGYQGIIELIYRAGAVSSVVVEAVRRADTFHYVPGRDERPIHEIDWFNDDRGPLVGVYAYAVMKDGATSKVVVLNKRQVMEAKAKSDSRNSQYSPWQTNEEAMWLKTAVRRLAKWVPTSAEYMREQLRAAKEVAAEPTPDAPSLPPVQAAPLDDVDPDTGEVLEGELLDEPSTT

SEQ ID NO: 141 - protein, 209 aa, Unknown
  Hungatella hathewayi DSM 13479
MDELTLNQPVTSLSSGVFSSAESFQELFNIGKMFSASTLVPQAYQGKPMDCTIAVDMANRMGVSPMMVMQNLYVVKGKPSWSGQACMSMIRASKEFKNVRLVYTGDKGTDSWGCYVQAEHRETGEPVKGTEVTIKMAKEEDWYGKTGSKWKTMPEQMLAYRAAAFFARVYIPNSLMGLHVEGEAEDITNESEIPEIPDIFGEKEKEAQV

SEQ ID NO: 142 - protein, 218 aa, Ureaplasma urealyticum
MVKDDKLVPSIRLLTPNELSEQWANPNSEINQITRAVLTIQGIDLKAIDLNQAAQIIYFCQANNLNPLNKEVYLIQMGNRLAPIVGIHTMTERAYRTERLVGIVQSYNDVNKSAKTILTIRSPGLKGLGTVEAEVFLSEYSTNKNLWLTKPITMLKKVSLAHALRLSGLLAFKGDTPYIYEEMQQGEAVPNKKMFTPPVAEVIEPAVENIKKVDFNEF

SEQ ID NO: 143 - protein, 219 aa, Unknown
  Clostridium sp FS41
MAENEKQALLQEENKSENVVSTVKRTALATNPFSDTDQFNNIFKMAQLISQSDMIPATYKGKPMNCVIALEQANRMGVSPLMVMQNLYVVKGVPSWSGQGCMMIIQGCGKFRDVDYVYSGEKGTDSRSCKVVATRISDGKRIEGTEITMQMVKSEGWISNTKWKNMPEQMLGYRAATFFARMYCPNELNGFATEGEAEDMNHKPQRIEAINVLGDTAHE

SEQ ID NO: 144 - protein, 227 aa, Unknown
  Clostridium sp CAG:470
MSNEVQKNNELMVKFDIDGNEIKLTPSIVQEYIVGTDAKITNQEFKLFTELCKVRKLNPFLREAYLIKYKAGVPAQLVVGKDAILKRAVLNPNYDGMESGIIVQKEDGSVEERQGTFRLGNEQLVGGWARVFRKDWTHPTYSSVSFNEVAQKTGQGQLNSNWGSKGATMVEKVAKVRALRETFVEDLAGMYEAEEMQQEISQQEPIEVQAEIEEQTENTKEVSMNEL

SEQ ID NO: 145 - protein, 228 aa, Unknown
  Coriobacteriales bacterium DNF00809
MASKNEAIEVSPAEIASVKEKPASIVKAEKAKKEPCALVKYEDAEGREVVLTREDIINTISSNPRITDKEIKLFIELARAQKLNPFTREIFITKYGDYPATFIVGKDVFTKRAQSNPLFKGMQAGIIVQRGNAVDQREGSATFGDEMLIGGWCKVYVQGYDVPIYDSVSFNEYAARKTDGTLNAMWASKPATMIRKVAIVHALREAFPSDFQGLYDQSEMGLSGQGGE

SEQ ID NO: 146 - protein, 244 aa, Clostridium sordellii
MSKLKSALQSKEAKGDGLTVSKSYAMKQLTIKMKNDIKEALPSHFCIDNFQKSAINTYNLDKSLQECEATTFISAMIECAKLGLEPNNILGQAYLVPVCVDGVNKVEFQIGYKGLIELAYRSGKIKSLYANEVFEKDEFHIDYGLDQKLIHKPFLGGDRGEVIGYYAVYQMDNRGASFVFMTRDEILGHSKKYSRSFGCDLWESEFDAMAKKTVIKKLLKYAPLSIELQKSVSIDESVKGVGCI

SEQ ID NO: 147 - protein, 249 aa, Unknown
  Streptococcus infantis SK970
MTNNQLSTQQTKRDISVNALDWTFEDIKRYFDPQNLLTEKQVGQALSLIKGRNLNPLANEVYIVAYKNRNGGTEFSLIVSKEAFLKRAAQSKNYEGFEAGVVAVDKDGVMHERKGALMLPGDTLVGGWARVYRKNFKVPVEIQVSLEEYNKKQSTWNSMPATMIRKTALVNALREAFPEDLGNMYTEDDGGETFDRIKDVTPQESREDVVARKMAQIEQFNKEQAHTDPEPTQNEEPIQGELLDGELEY

SEQ ID NO: 148 - protein, 251 aa, Unknown
  Leptotrichia goodfellowii F0264
MGRLTQNEANDKLIIFKVGNDEVKLSNNIVKRYLVTGQGNVTDEEIMYFMKLCKARNLNPFVRDAYLIKYSDKDAATIVVAKDAIEKRAIQHPKYNGKEVGLYIIKKETGDLEKRNGTIYLKEKEEIAGAWCTVYRKDWDNPVTVEVNFDEYVGRKKDGTANINWANRPVTMITKVAKAQALREAFIEEISGMYEAEEAGINVNDLDDTPIEQKDMQNMPDVTNTVQETEIDDEDLKKELFDNENKKNPLE

SEQ ID NO: 149 - protein, 251 aa, Unknown
  Lactobacillus rossiae DSM 15814
MAVVKRLKGVKSIEAYVVRQGNDFDVASEGEQVVVTKWQMHVADLDKPIAYAVCVIEKEDGTKSFTIMTKKQIDVSWSHAKTTKVQREYPDEMAKRTVINRAAKLFINTSDDSDLFVQAVNDTTSDEYDNDSRKDVTPSAESKGTQDLLDGFQSSNQSQQPSATSQSSQPVSTATSAEKSANPSAESAVTSKTAKPSSTAEDIINGYEQSQSSKGADTVDEDGHNVVIDHEDEEPDVHQGDIFNQHDNPQS

SEQ ID NO: 150 - protein, 253 aa, Unknown
  Paenibacillus sp FSL R7-0331
MTIAIETQVQETLDRILDSKHDALPSDFNKKRFSENCKVYVFDDKDLHKYTADEIAANLFKGAVLGLDFLAKECHLISGGVDLKFQTDYKGEMKLTKKYSIRPLLDVYAKNVREGDEFREEVIEGRQVIHFAPRPFNTSKIIGSFAVAFFHDGGMVCESIPAGEIEEIRKNYGKALGDAWDKSQGEMYKRTVLRRLCKTIETDFDAEQRLVYDAGGAFEFTKQPARSRQQSPFNPPEESEVIQNDRAAETDQG

SEQ ID NO: 151 - protein, 257 aa, Unknown
  Nocardia terpenica
MSEISKAVATQQNPLAVVARYKRELGTVLPTVLRQDPDRWLMAAENAARKNPDIMAVTKADQGASYMRALVECARLGHEPGSKDFHFIKRGNAISGEESYRGIIKRVLNSGFYRSVVARTVFSNDTYSFDPLTDIVPNHVPAQGDRGKPLSAYAFAVHWDGTPSTVAEATPERIATAKAKSFASDKPTSPWQLPTGVMYRKTAIRELEPYVHVAPEPQPRRHLDGTVGGIPATDFDVDDGDVLDITADQLAEAGEIV

SEQ ID NO: 152 - protein, 260 aa, Unknown
  Dermabacter sp HFH0086
MSNALTITQDQTEFTPKQLSVLENLGVQGAAPQEVAMFFDYCQRTGLSPWARQIYMIGRWDRNLGRKKYAVQVSIDGQRLVAERSGVYEGQTAPQWCGPDGQWVDVWLANEPPQAARVGVWRKSFREPAYGVARLSSYMPVTRDGKPQGLWGTMPDVMLAKCAESLALRKAFPLELSGLYTSEEMQQADAPRTEPAPVDEDVVDAEIVDDEERMQWVEAIQAAETTDVLRKMWADIKTCPDALQAELRELIPARAKELAA

SEQ ID NO: 153 - protein, 261 aa, Unknown
  Leifsonia xyli subsp xyli, Leifsonia xyli subsp xyli (strain CTCB07)
MAVKKNPTIEDYLIKYEPEFQRALGASMDAAKFAQDALTAIKQNPKIGHSDPRSLFGALFLAAQLKLPVGGPLAQFHLTTRTVKGNLTVVPIVGYGGYVQLIMNTGLYSRVSAFLIHAGDYFVTGANSERGEFYDFRRADSDRGEVKGVIAYAKVKGHNESSWVYIDAETMRAKHRPKYWESTPWADDAGEMFKKTGIRVLQKYLPKSVESLNVALAASADQAIVRKVDGVPDLDIQHDRDTETVAVPEQPVSVPQPGDET

SEQ ID NO: 154 - protein, 261 aa, Unknown
  Lactobacillus shenzhenensis LY-73
MSAVSESKDLQHVDQLSVLNSAMTAASLNLPINQNLGFFYLVPYKGIAQAQMGYKGYIQLAQRSGQYQRLNAIPVYADEFGSWNPLTEELDYTPHFEDRKASDKPVGYVGFFKLANGFEKTVYWSRKQIEAHRDRFSKSSKSSASPWNTDFDAMALKTVLRNLITKWGPMTTDIQRANDADEGDYKNDLSTDTSEPKDVTPGASLEQFLGETDQQQKPATKPAPKKKAEEAKPNDLKPDVTHDPNEHTEQTSLSDDDLPFD

SEQ ID NO: 155 - protein, 261 aa, Unknown
  Pseudoalteromonas lipolytica SCSIO 04301
MSLSLQEYQNLLYGKLTACKGQFDAYLSENGYKLDFNTELNYVYQIVMSGLNVEYSFPYTPVESVISSFLKAAKIGLSLCPTEQLCFLKTEYSESSGQYVTQLGLGYKGILKLAYRSGKVKQINANVFYEKDTFQYNGVNSKVTHTTTVLSKAMRGQLAGGYCQTELIDGSFKTTVMPPEEILAIEEQGKVMGNEAWLSVHVDQMREKTLIKRHWKTLCPCIYRDSVMNDPMLFDDQDCQHSSNQQAYEEQFESAYSREAY

SEQ ID NO: 156 - protein, 268 aa, Unknown
  Acetobacter orientalis 21F-2
MSNAVATHNPVLQPNNFQELIGFAKMAAASDLMPKDYKGKPENIMIAVQMGSELGLAPMQAIQNIAVINGRPSVWGDAMLALVRGSGKCSSVKEIFEGDGDNLAAVCVVRRVDGDEVRGEFSVADAKRANLWSKQGPWQQYPRRMLQMRARGFALRDAFPDVLRGLIGAEEAQDIPADPIDVTPRHRHVEPPKTIDHKQIFSDRLEGCPDALSVDNQWTVWESTIQKAFDAGRPIPEAVQDAVRDMIAAKRAEFDRQATEAPIEEPVA

SEQ ID NO: 157 - protein, 270 aa, Unknown
  Collinsella stercoris DSM 13279
MNQIVKFTDDSGLAVQVTPDDVRRYICENATEKEVGLFLQLCQTQRLNPFVKDAYLVKYGGAPASMITSYQVFNRRACRDANYDGIKSGVVVLRDGDVVHKRGAACYKKAGEELIGGWAEVRFKDGRETAYAEVALDDYSTGKSNWAKMPGVMIEKCAKAAAWRLAFPDTFQGMYAAEEMDQAQQPEQVRAQAEQPVDLQPIRELFKPYCEHFGITPAEGMTAVCGAVGAEGMHSMTEQQARRARAWMEEEMAAPAVEAEYEVVDEGEVF

SEQ ID NO: 158 - protein, 271 aa, Unknown
  Lactobacillus capillatus DSM 19910
MANEVAEKNEVVYLAGNEEVKLKPSTVRDFLTSGNGNITSQEAFMFIKLCEYQHLNPFLNEAYLIKFGNKPAQIITSKEAFMKRAESHPAYNGVKAGLIVLRNSDVKYTKGAFKLPTDKILGAWAEVNRKDRDEPHHIEISMEEFSKQQSTWKSMPATMIRKTAIVNALREAFPETLGGMYTEDDKNPNEAVKESEPVDDKAESVVDDLVKDIKPKNEPAEKEGEPKESEQYEEQETTFEEVNSKEAEKDGDSNSEEQTSLFKGATIQPNV

SEQ ID NO: 159 - protein, 272 aa, Treponema socranskii
MNEIIKKEATEIITPVDEKTIMEYLDTTGLTKSLLPKEKAMFVNMARLYGLNPFKREIYCTVYGEGQYRQCSIVTGYEVYLKRAERIGKLDGWQAQITGSLQDGTLAATVTIWRKDWTHPFTHTAFYTECVQTSKKTGEPNAIWRKMPSFMVRKVAIAQAFRLCFSDEFGGMPYTNDEMGVDAPKERDITHEATATIADEAEAPSAEVKNEPKPADVVQQLETLLMKYESQLSGKPYELAEEALRTGSDAEVIAMYERVVSYLKRKGIQVGK

SEQ ID NO: 160 - protein, 272 aa, Bifidobacterium magnum
MTSSTLVPSTLEEQKTYAELVAQSTGMVPAAYQGKPANIFVAIQYGSSLGLEPMASLQGINVIQGKPTLSAQAMLGLLKSQHFKVHITKDDENQRVTVEVIDPDDPDYSTVSVWDMAKARKAGLGGDQYWTKQPMTMLKWRAVSEAAREAAPHLFLGLGGAYTKEELEESVTVENVEETPRPRSPYSSYTRKPEPVEPEVVEAEPVEPEPINLIIQTMRENGVDTAQKARLVLTQIVGVENVNDIPADKLETLCANLDGFAHDIQQTLGDNK

SEQ ID NO: 161 - protein, 273 aa, Unknown
  Frateuria aurantia (strain ATCC 33424 / DSM 6220 / NBRC 3245 / NCIMB13370) (Acetobacter aurantius)
MSEISVARAQNLAQIERVNALLPTSIGEAMQLAEFMAKSDLLPPHLKGRQGDCLLVVMQAQRWGMDALSVAQCTSVVHGRLCYEGKLVAAALYSQKAIDGRLHYEISGHGQDASIVVTGTPRGTGQTQSVSGSVRKWRTITMKKQDGAPPKRVDNAWDTIPEDMLVYRGTRQWARRYAPEVMLGVQTPDEVDDTPMQTTVIHSTAASSPAIEPLIPYPEEEFSKNFDTWLGRIQCGRNSAEEVIAKLQTKYTLTPGQLGAIRDLETTEAEVVE

SEQ ID NO: 162 - protein, 277 aa, Unknown
  Parcubacteria bacterium 32_520
MKKETTQNKAKKITKKASSKKKETKKIVVKEQQITDPALLTKAKIDLIKRTVAKGATDDELQMFLTVAARAGLDPFTKQIHLVKRHSTAEGRDIATIQTGIDGYRAIAEKTGKYGGSDDATFTFADGQDKIPTSATVKVYKIIGDKVIEIKATAYWDEFAPTNEKLAFMWRKMPKLMLAKCAEALALRKAFPNVLSGIYTHEEMEQLDEEKNVNDKKATLANSKAYIYSAKSLDELKGFRERIEKSKIDKATKEKLLKYCQEKEVELSAIEAEIESV

SEQ ID NO: 163 - protein, 279 aa, Unknown
  Helicobacter sp MIT 05-5294
MNEVAKLNESRASNQKMIATILESDSSHKKLNDFFAGDSAKVQRFKSSLINIAGNSILSSCSPASIIRSAFSLAEIGLDINQTLKQSYVLKYGIEAEPVISYKGWQSILEKVGKKSRAFCVFKCDTFNIDFSTFEGNLTFVPNYAQRDETNRKWFNDNLLGVVVLIKDKDASEIVNFVSAKKIDKIKGCSPSVKKGRNSPYDEWFEEMYLAKAIKYVLSKQALTEKEETIARAIDIENEVEAKIQKEASNYEIKDLEELMQDKEVMAMTLDAEEGIPQI

SEQ ID NO: 164 - protein, 280 aa, Unknown
  Mycobacterium brisbanense
MTETAVAKPEQRPTTISQVLQVMIPELTRAIPKGMDADRLARIVQTEIRKSRNAKAAGITRQSLDDCTQESFAGALLTASALGLEPGINGECYLVPYRDTRRRVVECQLIIGYQGIVKLFWQHPRARGIKTDWVGANDHFEYEDGLNTVLVHRKAADRGEPIAFWAVVKVADADPLVTVLTADEVKELRKGKVGSSGDIKDVQHWMERKTVLKQGLKLAPKTTRLDAAIVNDDRAGTDLSRSQALMLPPGVQSTADYIDGTVDEEPQGYEEIAETEAQVQ

SEQ ID NO: 165 - protein, 281 aa, Unknown
  Capnocytophaga sp oral taxon 338 str F0234
MSAITQTTDKRLGNFLNQANTADFLTKTLGARKSEFVSNLLAISDADKNLSQCDPSEVMKCAMNATALNLPLSKNLGYAYVIPYKDWKTQEVHPQFQIGYKGFVQLAIRSGQYRTINTCEVREGEIKRNKFTGHTEFLGENPEGKVIGYLAYIELQNGFQQSLYMTLEQVQEHVSKYSKSGIDKDTKEFKGIWRNEFDTMAKKTVLKLLLNRFGVLSVEMQQAIEKDQADSEGRYIDNPQGGRYVQDAVIIEQSEPTEVVSQEEPSPAPTKGIKQVDFKQM

SEQ ID NO: 166 - protein, 283 aa, Unknown
  Salinisphaera hydrothermalis C41B8
MTNGASNQGRSGGQKKLIERIGDKYGVDANKMLSTLTATAFRQKNDQPITNEQMMALLVVADQYNLNPFTKEIYAFPDKNAGIVPIVGVDGWSRIINEHDSFDGMDFEASDEFIELDKHHKKCPEYITCRMYRKDRSRPVEITEYLDEVYRPPFMKNGNPMIGPWQSHTKRFLRHKAMIQCARLAFGFVGIFDQDEAERIVQGEVVSSERNGAAPPARQTEAPAAAERTLNDQQQNQVQAAIEESGADKAGLLKQLGVASIDQIPVTRFSLVMDRINAQTEDA

SEQ ID NO: 167 - protein, 283 aa, Unknown
  Candidatus Cloacimonas sp SDB
MQSLAVAKNESLMPLSFQEKLSMASVFIKSNLMPRGYDTPEKVVIALEMGHELGLPPLVAIMNIAIINGTPTLKADMMVALALRSGKIEDIKIQYSGKENMNDNQFKCKVTIRRRGVETPFKASFSRQDAKVAGLDYKDNWKKYERRMLKHRAMAFCIRDALPEIFAGVYLPEELEGIESYGGNRNTVILPAAQIEKTASNIEDNTADESLPSKVTDSQIKALKELSERLFNEGIVTSYIYDQYAVNRIEDLDQGKAGKLILLLQNEPGKISEWIEDTYQKTA

SEQ ID NO: 168 - protein, 284 aa, Unknown
  Elusimicrobium minutum (strain Pei191)
MTTENIQRTPALGILLEQAPFYSKAQNLEQKKIEDMMVSFAYIAHKVIKRHQDKGRGEVDVQSIKEAFKCSMDTGIPVDNRRLAYLTIVKNNSTGKYEIQYEPGYMGFVHKLRQIKPGAVVQTILLWEKDVFTYKSTTGVAEYSYVPEKPMRSDFNHIIGGFCYISYFEHGREYSFVTPMTKAELDLARGKAKTQDVWGVWPGEMYKKVIIKRAGKVEFIGEPEMEKLNEIDDRSYTGFERKQPAKVDYSAVKPLPQEITETEALPAPGGDDTVQDVFSMEEPQ

SEQ ID NO: 169 - protein, 284 aa, Spiroplasma kunkelii
MNNKIELILNNSKVNNWINEKLTNQKEINLFRKNILTIYNNNPNLFDKEKINLMSVLSACVKAMLLDLPLDPNLGYAYIVPYNGKGQLQIGYKGYIQLAIRTGKYLTINAIEVKQGELLNFDELEQEYNFKWITNENERTKKETIGYVAFFKLLNGYKKTLYWSKEKCENHFKTYSKNYQTYGKFTVGSYEGMALKTVLTQLLRKWGIMSVEMQEVYQHDQAIIINNSKEFSDNPNIKNKEDKNVIELNNKKDELNLNLEQEFSINEINDDEEIAKTVDEMFSD

SEQ ID NO: 170 - protein, 284 aa, Haemophilus paragallinarum
MLKTAKPESIFNAACMAATLNLPLQNGLGFAYLVPFRTKRKVPLVDTEGNVILDRDGKPRTKEEYVIEAQFQIGYKGFIQLAQRSGQFKRLVALPVYKKQLVKKDFINGFEFDWEQEPEEGELPIGYYAYFKLVNDFSAELYMTHEEIEKHAKKYSQTYRTYLEKKAKGQWASSVWADNFESMALKTVMKLLLSKQAPLSVEMQNAVLADQSVIKDSENGEFDYPDNNIDDAEIVTMNVSQETFEQCKQNILNRETTLQALCDSGFKFSPEQYAQLEALENNRE

SEQ ID NO: 171 - protein, 284 aa, Unknown
  Endozoicomonas montiporae, Endozoicomonas montiporae CL-33
MPKATAKKSPATQVVDTAEKPATIKDLLRNNKNTIAQALENTPLTPERLLSVCMTEIRKTPKLRECSQASLVGSIIQSAQLGLEPGSALGHCYLIPFWNNKLRSLECQFMLGYRGMLALARRSGSIVSIDARVVYAADEFSLLYGTITEIIHKPKLTGEKGGVVGVYAVAQLQGGGTQVDFMPVEDILKIRDSSKGVQSGKDTPWKTHFEEMAKKTVVRRLFKFLPVSVEALTAVGLDEKAEAGQSQCNEALIQEGDGGVLVDMDTGEIIEGKVTSAADLNRAL

SEQ ID NO: 172 - protein, 285 aa, Unknown
  Roseateles depolymerans
MSEIAPVNQTAIAANTDLGNPSAFLFDSERMTALMEFSNLMSRGSVTVPKHLQGKPADCMAITLQAMRWRMDPYIVGSKTHLVNGNLGYEAQLVVAVLKNSGAVKGRPHYEFRGEGNNLECRAGFIPAGEDAVLWTEWLSISGIKVKNSPLWQTNPKQQFGYLQARNWARLYAPDALLGVYTEDELQVMPSQPSVRDMGQAEEVARPALPAYPQADFDKNLPGWRNVVESGRKSAPDLLAMLQTKATFSAEQQEAILALGVIEQDAAEVDDPFVRDMEAAEGEQQ

SEQ ID NO: 173 - protein, 288 aa, Haemophilus parasuis
MTTNLPSNIQTALSERGIDHAVWSTLQNSIFPGAKDESILLAIDYCKARKMDILKKPCHIVPMNVTNAKTAEKEWRDVIMPGIYEQRITAFRTGQMAGQDDPVFGDTIEYLGVNAPEWCKVTVYRFVNGERCAFSHTEYFTEACAITEIWKDKQRTGKYKVNSMWTKRPRGQLAKCAEAGALRKAFPDELGGVITADEITEEPINPASPQQTVIDVDGVVRIADEQRQQLDQLIQITQTDVAKAIAYYGVNSLDQLPKDKAEHLIKILNERVDKLQAQSENLGENIPL

SEQ ID NO: 174 - protein, 291 aa, Unknown
  Sodalis glossinidius (strain morsitans)
MANELNTTSAILAEKGVDFATWSALKNSIYPGAKDESVMMALDYCRARQLDPLMKPVHLVPMYITDAKTGKGQQRDIVMPGVELYRIQADRSGNYAGAKEPEFGPDETKIFGADETKNFKGIEVTFPQWCKYTVCKMMPSGQIVEYSAKEYWLENYATAGRDSSAPNAMWKKRPYGQIAKCAEAQALRKAWPEIGQQPTAEEMEGKTLDVIDARDVTPSASHSTSHKSATTETLQAINDLLLSLDKTWDEDFLPLCSTVFKRQVSKAAELTDQEALKALDFLRKRATKDAA

SEQ ID NO: 175 - protein, 295 aa, Nocardia farcinica
MARNLVDRIEQNAPAKNDDLKAAIQKMEKAFALAMPKGAEATQLIRDAFTAIQRTPKLAQCEQLSVLGAFMTCAQLGLRPGVLGQAYVLPFWDRKDRMYKAQFVAGYRGLVDLAYRSDRVLSVSARIVHANDYFELEYNAVEDRLVHRPYLDGARGEARLYYAAGRTRGGGSAITDPVTVADMLKYRDRYATAKNKEGKVFGPWVDEFDGMAKKTMIRQLSKMLPMSTELTLAVENDGSVRFDLGKDAIESPQRLEPDVIDAEAVATSDVQDAPADYYEDVPPAAEGGMFAPEGE

SEQ ID NO: 176 - protein, 298 aa, Unknown
  Parasutterella excrementihominis CAG:233
MENIEIKAQTVSLVARLAAKFGVEPGKLMACLMNQVFKQSDGVAPSNEELMVLLLVCENFGLNPFNREIFAFRGKGGDVIPVVSLDGWCKIVRNQKDFNGMSFKFSESTIKLNCYGGELPEYVECSIKLKGVEDPVTIQEYMVECFNEKSSVWRKWPRRMLRTRGFIQCARLAFSLTGIYDEGDTFGEDSFNGSGTTSDLKSQIPLVQQIPARPSLEKSRLDALIGKLIEHAKNRDDGWKRAFQWIEEKFSQEDCAYAREVLTAKRKELSLSSLPEGNEILPEETSPATLQGVSNEDR

SEQ ID NO: 177 - protein, 299 aa, Unknown
  Salinispora tropica (strain ATCC BAA-916 / DSM 44818 / CNB-440)
MTQTVSQAVATRDNSPAGLITQYSESFAQVLPSHIKPATWVRLAQGALKRGKRGDGGRFELEIAASNNPGVFLAALLDAARQGLEPGTEQYYLTPRKVKGRLEILGITGYQGHIELMYRAGAVASVVAEIVREHDEYRYQRGIDDVPVHRYKPFARDAERGALIGVYAYARMKDGAVSRVVELSRDDIDRIKASSQGANSEYSPWQKHEAAMWLKSAVRQLQKWVPTSAEFRREQLRAAAEAHRVASAADAPDGATAPQGDVLDGEVLDEAPTEPARSDDAGGHVEQEWPDAARPGGAQ

SEQ ID NO: 178 - protein, 300 aa, Unknown
  Microbacterium ginsengisoli
MSEVALPSSVRPDTWNADTAAMMEFAGLTWIEGVGDAAHRVFAPSGVMAAFIAACARTGLDPTAKQIYAAQMGGKWTVLVGIDGMRVVAQRTGQYDGQDPIEWLAAEDGQWTTVPPKAPYAARVAIYRKGVSRPLVQTVTLAEFGGRGGNWSQRPSHMLGIRAESHAFRRAFPMELAGLYTPEDFESDDVDTSDAPWEEREDWGALIASATTTGDLARVGARIAESGQGNDDIRAAYRARAAVLATEANTVDADVVDDQTPAEGEDASPTPPASPSAGTPDDYEAAASAEFDAAVERGEI

SEQ ID NO: 179 - protein, 301 aa, Unknown
  Labilithrix luteola
MASTEMTRSAGAAPLARRGGGDLKEFLGSDAVRKKLAEAAGKVMRPEDLIRFALVAASRTPDLAKCSKESVLRSLLDSAALNIMPGGLMGRGYLVPRKNTKNNTTECHFDPGWRGLIDIARRGGKVRRIEAHVVHAADVFSYERSPLTTLHHVPSELDDPGEIRAAYAVAEFVDGGIQIEVVTRRDLNKIRAMGAKNGPWSTWGEEMARKTAVRRLCKYLPYDPLLERAMHASDESDVNAFDEVVEVTAPKKRRRSLDEKVDEVAASMLPPAEPDSQQDLPVDADFDEADDGTSDAAEPTN

SEQ ID NO: 180 - protein, 302 aa, Eubacterium rectale
MAEQNAVATQQGTQLSVAAQVKSMISQDAVKKKFTEVLGQKAPQFLASITNVVAGSAQLKKCPATTIMSAAFVAATYDLPIDSNLGFAAIVPYNNNKYNPQTRQWEKHPEAQFQMMYKGFIQLAIRSGYYEKMNCSVVYKDELVSYNPITGEVEFVTDFSKCTQRAEGKSENIAGYYAWFKLLTGFRKELFMTTAEVENHARKYSTAYRYDLENNKKGSKWTTDFEAMALKTVIKMLLSKWGILSVDMQRAIQDDQKVYDEDGEGSYGDNQPDIVEAQDPFGNIEQKEEEQQIGGLDLEEVE

SEQ ID NO: 181 - protein, 302 aa, Spiroplasma kunkelii
MITELQQYIKGAIIKYELKVNDKYLKENILALEELKMKNGQSYMQLVNTADNTKITALGIIKLSNKGLIFGKDFNIIPFKNKLTTVIDSKVYCKRIEESGYSPRKAIIFKGEKFEWDSLNSCPKIHEINFNANTSDYNEIIGAYAFAKDKNGNYQGILLRKADIERLKNSSPSGNSEYSPWNKWPKEMVEAKLYRKLALEMGIDISDIDLDEKEIKEDGNFEYISFKDINVAKNKGQISDEPLSSAFLIKILDIVFSLILAFSIVCKISLYLFPSPKNEVILFIKFCSFLWYFFKPNSSSKG

SEQ ID NO: 182 - protein, 303 aa, Unknown
  Methylobacterium nodulans (strain LMG 21967 / CNCM I-2342 / ORS 2060)
MTAGALTLSDAERRVAERVDPAATAALSVSAESGGVAFANAGQLMEFAKLMAVSSAGVRKHLRGNPGACLAICTQAVEWGMSPYAVANNSYFVNDQIAFESKLVQAVILKRAPIKGRIRFEYTGDGDERRCRAWARLADEPDEVVDYLSPPLGKITPKNSPLWKQDPDQQLAYFSGRALCRRHFPDVLLGVYADDEIEVAPRGPDQARDVTPRGLAGRLDALAAAPPPTASAAVDAFTDTEAPGNGPATAPAEDEPETGAQGADVGESGDWHDPALGGAADDFPGNDALSDMRTGRRSSRWEA

SEQ ID NO: 183 - protein, 303 aa, Unknown
  Anaerococcus hydrogenalis ACS-025-V-Sch4
MTNAKNALKKNAQNKAPAKKQNTTVRGLLMAMKGEIQNALPSYLPTDKFIRTALTAINTTPKLAECTQDSLLAAIMNSAQLGLEFNTPLGESYLIPYENKKLGITTVNFQIGYQGLLKLAYNTGQFKRITAREVRENEDFYINYGTGEVKHEPCLTGDSGDVIGYYAIYQTKDGGQDVFYMSKADAEKYGRTYSKSYNFSSSPWQSNFDAMAKKSCLIQVLKYAPKAIESQKLVEATKTDNANFKSYKKEDDGSINLDVDYEVEVEEDKKEAPKNVDKETGEIKSEDIAQTGFFEDDFEPVSE

SEQ ID NO: 184 - protein, 303 aa, Unknown
  Sporosarcina newyorkensis 2681
MTNQLQPQSNTPAEKKNELVTKVADKVQRMVENNQINIPQNYSIVNAVQAAYFKLTEVDFKKKTSLMDTATPDSVAFSLQDMAIQALSVAKNQGYFIVYGDKMQFVRSYHGTQAVLKRLNGVKDVWANVIWKGETFDVEYNDRGQLAFKSHTVDWQAATGKKEDIQGAYCIIEREDGVQFLTVMTMAEIKTSWSQSSTTAVQDKYPQEMAKRTVINRASKAFINTSDDSDLFIGAVNRTTENEFEDDRPIKEINPQHEIDQNANKEVLDFTEPEQSPQPVQEPELVQEPVRQPEPASSGGPGF

SEQ ID NO: 185 - protein, 306 aa, Clostridium beijerinckii
MAETGLVLSKEDAFNNVMAKIAALEKNNGIKLPKNYSAENAINSAWLMLQEVVDKEKKQALEVCTKTSIVEALYNMVLQGLSPSKRQCYFIVHGSKLTLMKSYMGSIVATKRLSGIKDVKAFVIYEGDVFETVFNNETYTIEFNYQPKFENINSNKIKGAFALIIGDDNKLLHTEIMTIDQIRKSWGMGIAYKSGKSNTHNDFGEEMAKKSVINRACKRFYNTSDDSDVLIESLNNTDEDYDEADIIENAKEQVHEEIKANANQEVIDVDPKQVTEIDNNNNENPIQKDLNNKKTEKAEQQMMCEF

SEQ ID NO: 186 - protein, 306 aa, Paenibacillus alvei
MSTAVQNINTQAVVGSFTQSELDTLKSTIAKGTSNEQFALFVQTCARSGLNPFLNQIYCIVYNGKNGPVMSIQIAVEGIVALAKKHPQYKGFIAAEIRQNDHFKAKIHTGEVEHEPDVMNPGETIGAYCVAYRENAPNVLVIVRRDQVEHLLKGRNSDMWRDYFDDMIVKHAIKRAFKRQFGIEVSEDEYVQPNSIDNTASYETRKDITADVESGTPQLQQPLQNSQNGENGEIKKVRRDISAAFKKLGITTEKAMTEYTMARMKQKGDKPTLQELTGLLKVMQLEIEEKEVFADGASEAGLEPLE

SEQ ID NO: 187 - protein, 306 aa, Bacillus sporothermodurans
MANNQLAVYQDLTFGELTQQDIVTVRETIGKDCNESQFKLFMSIAKNSGANPILNEIYPAVRGGQLTVQFGIDFYVRKAKETEGYQGYDVQLVHENDGFKMHQEKDEDGRYYIVIDEHSWGFPRGKVIGGYAIAYKEGLKPFTVIMEVDEVEHFKKSNIGMQKTMWTNYFNDMFKKHMTRRALKAAFNLNFDDDEVGEGSGSDGIPEYKPQTRKDITPNQEIIDAPSKQEVHEEDPQLAQAKKDMKTKFKKLGITTKKGMQDYIKQHAPQIGDNPTYQQLVGLLDIMDMHIDMNEVQASDADDVLE

SEQ ID NO: 188 - protein, 307 aa, Unknown
  Bacillus sp 2_A_57_CT2
MAKNNELATQSAELNELHQIGGFGVNELMTMKETVGKDLSIPQFNLFMYQCNRMGLDPSLRHAFPIVYGGKMDIRVSYEGLKSLAQKSDGYQGVFTQVVCENEIDDFDVLLNDEGEMVGVKHKPRFPRGKVLGAYAVAKREGRSNYVVFMDVSEVQKWMKINGKFWKQDNGDVDPDMFKKHVGTRAIKGQFDIADVVVDGMEAVADSNPIPEYKPGERKDITPDNNVIEPPKESEEEKHKKALRSSINQAFKKLGITGKKETAEYIEKHAPSFTNENPSLADLNGLLKLLEMNLEMIEMQSGGDELE

SEQ ID NO: 189 - protein, 308 aa, Unknown
  Thermaerobacter marianensis (strain ATCC 700841 / DSM 12885 / JCM10246 / 7p75a)
MAVQTDQVRNKLARRAQENGAPAPSQQPKTIEQWLRDERFRAEIERALPRHLSADRLLRITLTVLRTTPELRRCTVPSLLAAVLQCAQLGLEPGVLGHVYLVPFKNGKTGEYEVQVIIGYKGWVELARRSGQIQSLTARVVYQNDEFELSFGIEDNLRHVPWYMRPNVQDGGPIRGAYSVARFKDGGYHLHYMPIQQIEARRKRSRAADSGPWKTDYEAMVLKTVVRDASKWWPLSPEIARGLAQDESIKRTVDDVDSDAPYFGEDVIDVQGEDVGEGGEDAAHEEGGDASAGGDGSAQFGLFGGGGQ

SEQ ID NO: 190 - protein, 308 aa, Unknown
  Salinicoccus halodurans
MTKNEVLVKNQKMGDNVLARVKELEGQGNLNFPANYAPENAMKSAMLILQDLKGSKKDGYKPALEFANPNSVANALMDMVVQGLNPQKSQGYFIMYGDKVQFQRSYLGTMSVTKRVTGAKEINAEVIFEGDDVEYETINGKITNLKHKTKFGNRDTKNIIGAYATIVFEDESKNYTEIMTTDEIETAWKQSQMVYNGEFKADGTHRKYPQEMSKKTVINRACKKLLNSSDDSSLLKQQVMNSDDRQRKEVFDTQVSENHATEDLDFPDDVVDGEFKEADQEPEPMQKPVDYDEETGEVKEDDKDDNPF

SEQ ID NO: 191 - protein, 309 aa, Unknown
  Dialister sp CAG:486
MDARKGIVATRNEMTAQQQERPSIPKLLNNTLDNSGYKRRFDELLGKRAPQFVSSLAALINSTPQVLSIFQNNPVAIIQSALKAAAYDLPIEPSLGYAYILPFGQTATFVLGYKGMVQLALRTGLYMRLNAVDVREGELISYDRLTEDIEFRWEADNAKRAKIPVIGYAAFYRLKNGMEKTLFMTKAEIDAHELANRKGRSQNPVWRNHYDEMAKKTVLRRLLSKWGIMSINYLDASPADQEVMRNMAEGTLDDTEMPQERTIANSPNLAPVSPADPAEAITIPWEQGNAQEGQNQAVAGEAMNGGEGK

SEQ ID NO: 192 - protein, 310 aa, Leuconostoc mesenteroides
MANEVAQVQKIINSDKMQKHFEEILQDNAAGFLSGLSTVVALNPDLAKTNMNDLTNAAMRAAILDLSVLPDLGEAYVIPYGKRAKVDGKWVTKDVKAQFQLGYRGIIKLVQNTGRVGRLGGSVVYEANKPHYNYVFDEFTMENENYDPYVDGESPVAGYLAFYYLDGERIVKYWPIQRVINHATKFSQTYKGPDHKDRYGKTPQTPWYTDFDAMAIKTVMKDLLKFAPKTTKVAQAIAEDDKNEREARDVTPETEEITPEEQNVEPEIIDNQPAEKSDNPFSGVDTGDAPNPFAEKNETSEDVKWVSQKQ

SEQ ID NO: 193 - protein, 310 aa, Unknown
  gamma proteobacterium BDW918
MSDQNPLVICKDQIAKSAVKFGSSELSYESEEIFAMQQLMKNDYLLKTAVNDPDSLRLAMYNVASTGISLNPARHLAYLVPRADKKGQPAKIKLDISYRGLIALAQSEGIIANAVCELVYEQDTYLFKGPTRIPEHAANVFSTTRGAVIGGYCITELTNGKVQIHNMSKADMDQIRDSSQAFGSGSGPWVEWESQMQLKSIVKRAAKWWPASTPKMAKVIEFLNVENGEGIATIEHQPSNRIVAPAKPEDIDSRTLGFINQALTRAVQSQSFEACGELIRERVKDPAALAYGLEKLKELQTQHGDYRHAG

SEQ ID NO: 194 - protein, 310 aa, Unknown
  Paenibacillus sp P1XP2
MANNTQIILTPEIKEAFPAEVLDVIRTSLCPTATDPEFLLFAHKAASYRLDPFKNEIFFIKYGSQARIQFAAEAYLAKAREKEGFQPPDTQTVCANDTFKARKFKNDKGEDEWEVIEHEVTFPRGPIVGAYSIAYRDGYRPVTVFVDKEHIAHMYTGQNKDNWNKWEPDMIGKHAEQRALKKQYGLDFGNEELEHPPAPAASSFERKDITNEVNQATAAANAQSTPSSDQPNGSQAEEDEEAKINALKAQMKQNFAKLGLVNKADRDAHMAKHFKIKGEQPTIAEIMAYLKIMDLQIQEKQASLNDELPL

SEQ ID NO: 195 - protein, 313 aa, Unknown
  Gramella forsetii (strain KT0803)
MSSETSKQLVKQKKQDISTRVLAKVNEFEQTGELRIPKNYSVENSLKSAYLILSETKDKNKKPVLESCSVTSLSEALLKMVVWGLNPMKKQCYFVPYGGKIECIPDYTGKIAMAKRYAGLKDIKAHAVFKDDTFEFEVDPSTGRKKVTKHTQTLESMGSNEFKGAYAIMEMNDGTFDVEIMSKPQIVAAWQQGHANGTSPAHKKFPDRMARKSVINRACDALIRSSDDSVLYEDEDERKIIDVPSEDLKHEVKTKANKRNFDTSDIEDADYEEDEFPTNEAENEDDENERLYEEAMAEEEGQSSMANSPGFGA

SEQ ID NO: 196 - protein, 314 aa, Brevibacillus brevis
MSEAKTVNQSALAGQLAQRTMTKAENFNAVIKKELADNFQAIKSLVPKHMTPERLARITLTAISRTPALIDCTPASIVGAVMNCATLGLEPNLIGHAYLVPFKNNRTKQMECQFQIGYKGQIDLIRRTGDVSKIYAETVYENDLFIYIKGEDKRLVHVPFDMLHHLENFTPSKDDFMDIMMAQAIGAIKSRGANDQGKPVRYYSAYRLKDGAFDFVTMTAEQCQKHAMTHSAAKKDGKLVGPWKDHFESMCKKTCIKEMAKYMPISIEVQEKLSTDEAVLKLRKDNGIESDNIFDVDYKIVEEGQAEPDEEAAE

SEQ ID NO: 197 - protein, 317 aa, Unknown
  Prevotella sp CAG:873
MSKVNFSAQYIASLKPMQIVKDNLVRQRFIDLYGALWGEANAEATYEREVIHFNRLLADNANLKACTPVSIFIAFIDLAVCGLSVEPGVRALAYLQPRGYKTGQKDATDKDIYEQRCTLTISGYGELIQRTRAGQIRHADNPVIVYEGDGFSFTDHNGTKSVEYTLNINHNPERPVACFMRITRADGSIDYAVMLEEDWRRLAGYSGKANKKWDYDTRSYVEVPNSLYSSGEGNRIDSGFLMAKCIKHAFKTYPKLRIGKGTTYEADEAPRQEDDFYGMGDNEQPTAQPEESFAPAPDTSAGVTVDPSQSDDNDETF

SEQ ID NO: 198 - protein, 319 aa, Unknown
  Bacillus sp 1NLA3E
MSTQNELAVKTSSERFLNNIQAQFAAEAGSPVAFSDYEKALAQHLFLKLDSVLQDFEAKRINSGKTQQAPYNWHNINMRKLSLDAVHTVQLGLDALIANHIHPVPYFNGKEKKYDLDLRVGYIGKAYYRMEAAVEKPKDVVIELVYSTDHFKPMKKSFSNSIESYEFEIQKPFDRGEIVGGFGYLVYDDPAKNKLILVSEADFDKSRKAAKGDTFWSKHPAEMRFKTLVHRVTEKLQIDPKKVNASYLYVENKESEDEVRKEISENANKDVIDVEFSETPDEPVNKEPKVENHSEHFEEAPPQQEQMEFAPTGTGGPGF

SEQ ID NO: 199 - protein, 321 aa, Unknown
  Faecalibacterium sp CAG:82
MAKAMQPQKLYFSQAMQTEKYKKLINNTLGDPVRAARFAANITSAVAVNPTLQECDAGTILAGALLGESLLLQPSPQLGQFYLVPFKSKAKRDRQGNVIEPACLKAQFVLGYKGYTQLALRTGQYKRLNVLEVKSGELGGWDPFEERFHEMHFIEDFEKRAAMPTVGYIAHFEYINGFEKTLYWTADRMMAHADKYSPAFSATAYKKLLNGEIPQEDMWKYSSFWYRDFDGMAKKTMLRQLISKWGIMTVEMTTAYERDGRVMVPNSADDGLLPETPDFADAGQNGLSEQDPPKIERTAKTMDLPEPEADEVKAAVDLATL

SEQ ID NO: 200 - protein, 322 aa, Pelobacter propionicus
MSNALVKLEFDKEQMAVIETQLFPSGTSKAEQQYCLSVARELCLNPITKEIFFVKRRQKIDDKWVTKVEPMVGRDGFLSIAHRSKQFAGIETTAGIREVPQLEGGQWGFKNQLVTECIVWRKDSPKPFTVQVAYNEYCQRNSEGNPTKFWAEKPETMLKKVAESQALRKAFNIHGVYCPEELGAGFELASGDIVIQAIEEERPGNETDKSHLSVVKPPQAETQATKTPKHQKSSTATTSQSAPINEEVQTSPPSPGQVIDEAALLVIELLDGKHIPYDIAINGLDGIISAKSFNEKELLKSSGFRWSADQKRWIYKFRNEPF

SEQ ID NO: 201 - protein, 323 aa, Unknown
  Herbaspirillum sp YR522
MNQVALSPAGTLNQFLKQHKNQIEMALPKHITPDRMMRLTLTAFSQNRSLQDCTPQSIFASVIVASQLGLEIGVGGQGYLVPYKGTCTFVPGWQGLVDLVSRAGRATVWTGAVYRGDKFDWALGDRPFVKHQPEGDGDDWHDITHVYAIGRVNGSDHPVIEVWTMDRIVRHLNKFNKVGGKHYALTNNGQNMEMYARKVALLQVLKYMPKSVEVMRAMDVANAVDSGKNFTFDGDVVVIDDRDIDESPGDSSPGATGVQQQSGGRPEIPECTDEEFKAKTPRWRKQLLEDGVSEADLVKMIETRTKLTEDQKTTINSWTHEND

SEQ ID NO: 202 - protein, 324 aa, Unknown
  Desulfovibrio sp FW1012B
MSNGNLPQESGGASVAALIQQQIPAIAMAVSGGTKEERQKRAERFARVALTTIRNNDKLAQCRVESLLGALMTSASLNLEIDPRGLAYLIPYGREAQLQIGYKGIKELAYRAGGIKAIYAEVVYKPEVEAGMFTIEIGLSRSLTHKLDPLRPELRNGDLVLAYAVAEMEDGRRHFAYCLRDEVEKRRKTSKMNTASPDSTWGKWAEEMWRKTAVKKLCKDLPQSTEDAMAKAVALDDQAEAGVPQTFDLPKDFIDVTPEPKTASDRAAQVLGKTEAEAAPPVDAPTSVPCPNRPNDETGGFWDVKATVCEGCMDRGGCPSWVAA

SEQ ID NO: 203 - protein, 326 aa, Unknown
  Nitrolancea hollandica Lb
MADNNHALAIVPDSNEVKSLAKRLVPQFPSDCNAEQAADVARVAVAYGLDPFLGELIPYKGKPYLTFDGRIRIADNHPAYDGYDHGPVLGDERTAFMPQNGEVIWKCTVYRRDRSRPTVAYGRAGGDKETNPIAKKDPVTMAQKRAIHRALRAAFPVPIPGGDDDPVTPAQLKAIHATDSEQGITVTERHEVLEATFGVGSSKDLTAAQAGAYLDERAAQKPAMEQPAIEVTARPATPPQEPTDPPVGALLSARQQRRIYELRDELGKQTAELNAAIQELYKVDSIEGLSEAQASRFIRSLQRSAEKARQQQADDVIDAELADIPF

SEQ ID NO: 204 - protein, 327 aa, Fusobacterium mortiferum
MAETKRATNSLVKGSNGAVTEKKPNKTIYEIIKAGEKQFAAALPKHLNSERFTRIAITTIRQNPKLAECNAESLLGSLMTIAQLGLEPGVLGQCYLIPFKNNKLGTIECQFQLGYKGMIELLRRTGQLSDIYAYTVYSNDEFDIEYGLDRTLKHKPAFTNPEGRGEIVGFYSVAILKDGTRAFEYMTKKEVIEHEEKYRKGNFKNEIWNKNFEEMSLKTVTKKMLKWLPISVEMIENLRKDEQIHKLDEKTNEVTSEYIDENIINYDEDGVIVEEKPTTEDMQTLMTISQASGIDITKKAKELYGVSTLDDINMEQYNELKEIAING

SEQ ID NO: 205 - protein, 330 aa, Unknown
  Akkermansia sp KLE1798
MALTPGLVTLNHAKIMSNESTDKLDLPQAPVPKKTLYEIVMSEDVKTHITQFVEGMMTPERCISIFWNCCQKTPLLQQCAPITLISSLKNLLLMRCEPDGIHGYLVPFWVNDKRTGNSILTCAPVPSARGLMRMARSNGVTNLNIGIVREGEPFSWRLDDGKFTMGHIPGWGDNEDPIRGFYCTWTDKDSYLHGERMSLKAVEEIKGRSKSKNKKGEIVGPWVTDFGQMGLKTVIKRASKQWDLPLVIQAAMQAADDQEFEGNMRNVTPEKTDGPAEGETPWNNAPAPEAFQNDQPEALPEPKPEGQDDLIPGLKMPAPKETATVNMEDY

SEQ ID NO: 206 - protein, 332 aa, Unknown
  Thiorhodovibrio sp 970
MTRSMQAVPKADAPRIPMPAVDPALNLTPSTWKVLTDSIFPAAKTAEGILLAVHYCAARNLDVIKRPVHVVPMWSKALGQEIETVWPGIAEVQTTAARTGQWAGIDPPRFGPVIERTFSGKVKRNGAWQDLDYAVSFPEWCEVTVYRLVGGQRCPFTEPVFWLEAYARQGGAYSELPTEMWVKRPRGQLMKCAKAASLRAAFPEEASYTAEEMEGKVIEADTSIPVAASLDATGTVPAKADTAPSGVAEAASDAAPSKASETPTDSEPRAEPITLDPSLQARIDKVVARAAEKSAWKQAEQYLRARCKGAELKQALEALDQAQQTAEQRLAA

SEQ ID NO: 207 - protein, 333 aa, Sphingobacterium antarcticus
MSNQIQVTKDYIDRLHPLSVVKDAAIGDHFINKFVAMYRVPREQAVAFHEREKDNFIKRITDSEDLSACTPMSIFLAYMQVGGWQLSFEGGPQSDVYLIPGNRNVAPKGQPDKWIKEVVAQPTPYGEKKIRIQNGQIKDAAKPIIVYECDDYEEFTDDIGNVRVTWKKGNRGDKPVIVGSFIRIEKPDGSFEIKTFDMGDVAKWKASSENKNSKWDAAAGRKLPGKANALYTSNSGQIDKLFFEGKTLKHAFKLYPKVVNSPKLPDAFVPVASDAIRQGFDVSEFTEAEYVPEEDLSQSEQSDFDVALEEAHNTEPIQTKTFAGIDTSDEPEF

SEQ ID NO: 208 - protein, 340 aa, Rhizobium loti
MMNAITTYTHSPRQLALIQKTVAKDCNTDEFNLFVEVARAKGLDPFLGQIIPMIFSKGDSNKRKMTIIISRDGQRVIAQRCGDYRPASKPPSYEFDAELKSETNPQGIVSATVYLWKQDAKTAAWFEVAGQSYWDEFAPISYPYDAYKMVDTGETWEDSGKPKKKRVLRDGATPQLDDSGNWCRMPRLMIAKCAEMQALRAGWPEQFTGLYDEAEMDRAKVLEMAASEIVAHEQEENRLRLVAGNDAITMSWGDGWALENVPAGEFMDRCLAFIRESDHQTVVKWNSANRAGLQLFWAKHPGDALELKKAIEKASRAPVEIDHIADAARREIAQHPVSAG

SEQ ID NO: 209 - protein, 345 aa, Stigmatella aurantiaca
MDGHNKAETTAAQQAWGRERVELIKRTICPKGIGDDEFSLFIEQCKRSGLDPLLKEAFCVGRRQNAGSRERPTWVTRYEFQPSEAGMLARAERFPDFKGIQASAVYAEDEIIVDQGKGEVVHRFNPAKRKGALVGAWARVVREGKLPVVVWLDFSGYVQQTPLWAKIPTTMIEKCARVAALRKAYPEAFGGLYVREEMPAEEYEPSSAAEEPAPTTGTGTYEVLGARPGPVKASFPPLPAAQLSMEVQPPVAAPVAEPPPAAETAPRPRSSATVVAFGPYKGKTASELSDDELSETIDLAHEKLMEQPKAKWAKAMRENLVALDAETELRCRVPASGKKEASAEA

SEQ ID NO: 210 - protein, 347 aa, Unknown
  Methyloversatilis universalis (strain ATCC BAA-1314 / JCM 13912 /FAM5)
MTGPELAAAAKQTAQQAGSATVKKFFEANRGTLEALLPRHFDSERMLKLALGALRTTPKLANASLSSLLGSVVTCAQLGLEPNTPLGHAYLLPFDKREKQNGQWVTVETQVQVIIGYKGMLDLARRSGQIVSIAAHEVCQNDEFVFAYGLNEELVHRPAMKDRGPVIGFYAVAKLTGGGYSFEFMSVDEVNHIRDKAAEKNRAKRDAAGNPIITGPWADNYVEMGRKTVLRRLFKYLPISIESLAFASAVDGQAIREPAPLEQVAFESSEPAEEPTSYDQQDEDLRALEQSQPARVPPVQVEQPAEAWQPSAEEAAELERQQAAEAAADQQRASAPRGRGQRSMSLE

SEQ ID NO: 211 - protein, 347 aa, Hydrogenovibrio marinus
MYSQQAYPEQNQYPAATNNVVSVFDNSENKSAIKKLLPRHISIDKFMQIANTAAMQFPDLQECTPESLFVAFSRCAQDGLIPDGREAAIVSYNKKQGNTWIKVAQYQPMVEGVLKRLRMSSQVKNVIAKVVYENENFNHWIDIDGEHLMHQPVFDDKRGELKLVYALAKLDSGEKVVEVMLKSEVEEIMMNSKSAVDKNGVLKPYSVWATHFPRMALKTVIHRITRRLPNASEVAEMLEREIDYKLVSEDRQPQTIEHNQNQGSQDREIIPLEQQMELKKLVEQTGSDENNMFNWISNKTEILVSSYDQLDFNQFTRLKTRLENAIAKQVAAQRQQAMEQSGEFVSA

SEQ ID NO: 212 - protein, 348 aa, Photobacterium sp. SS9
MNELQRTNNQAPVNHQVNAVPTSSISILDTNKLDVMIRAAEFMSKAVVTVPEHLRGNSSDCLAIVMQAEQWGMNPFTVAQKTHLVSGTLGYEAQLVNAVISSSRAIVGRFHYRFSGGWERLVGKVGYEKQQRTNFKTKAKWEVTVATKKWLPEDEAGLWVECGAVVAGESEITWGPKLYLASILVRNSELWVTKPQQQIAYASLKDWSRLYTPAVMQGVYDREELAQPSFENIRDITPEIKPIKQLNNEPSIDSLMGGDAVEAETAGSNEPNLNALVSGDIEMMQNDDTPSVFETTRDLITDISDIQECVNYRRDIETMKNNQTITANEFSILKKMIKTVHNTFNVQG

SEQ ID NO: 213 - protein, 348 aa, Unknown
  Pirellula sp SH-Sr6A
MTAAAEERTEHVSGASPKRSEAMILLEDLQSDDTSRKLLQILPSHMKPEFFVRVVINQLNKNPKLALCTRQSFIGSVLDLAAIGLEPDGRRAHLIPYGRTCTYQLDYKGIAELVLRSGKVSHVAADVIRRGDIFVWNKGQLKEHVPHFLRTDAKAPKEAGEVFAAYSLVVFKDGTERAEVMSRADILAIRDGSPGWQAFVAKKSNDTPWDPRFPHKEFEMWKKTTFKRLSKWLPISAEAQAAIEKEDRNDYGDRNSNVINSPSVRTVRSADDLKEELKRRNAESTSTEVIHDTEFVAPEGISKQALLLELKAATDPLTIIEIERDLEHVRAEDRDEVLAAIASAKARL

SEQ ID NO: 214 - protein, 349 aa, Unknown
  Ahrensia sp R2A130
MNAIARLESGIDRSISNEIAVGSSGLTFQNAGQIMEYAKMMAVSGSAVPKHLRGNAGACLGIVDDALRFQMSPYALARKSYFVNDNLGYEAQVLAAIVISRSPLRERPNVNFEGEGQDRVCIVSATFNDGAEREVRSPAFKAITPKNSPLWKSDPDQQHSYYTLRAFARRHCPDVLLGMYDPEELSSMAARDVTPPRAPTAQERLKSIAAEKPAEPVLHNEGFGTGNMLEDAPASAVSEPEQSQADTGEIVDQQEQEPAPAVETRIEPERTTLNQDDKDVLTDFIIPFWKAESEEARKMVRMKHDPMIEARGKLATTAARKMVEAVIAGKPAEAGEVIGLTMQDMEELS

SEQ ID NO: 215 - protein, 350 aa, Borrelia duttonii
MTKNNILKNQSTNTVDVIIEKMNSSNIAEVWETYKIMHNLKKIDAYSEREILTLLQVNKLNPFKKEAYIIPFNGRYTVVVAYQTLLIRAYEAGYNKYDLDFEEKLVKSLKIDSKGNKMIQEDWQCTAFFKSDDGIRYSFSVLLSEYFKNTPIWREKPVFMLRKCAVSCLCRTLPGSGLESMPYIREELEDMGTVLQQELQGFEEVNNSTPEATIEIQSVNHNSGDDINKSIPTKYYCYQNLLIAARNMYNFVSDKPFGSLSEINTYLESVKSGDDSKLLEYFNTNKMLKSIEYWCNLLKEYFTKSSRDLSRLEKFNIFMSFDLDKVGNSPLKLFSQLSITKEFQCLFSLT

SEQ ID NO: 216 - protein, 351 aa, Unknown
  Candidatus Accumulibacter sp SK-12
MSKTLRNLQKSRQGTPANAVSFPVMLEQFKGEIARALPRHLSPERIVRVALTAFRLNPKLADVDPRSIFAAVIQSSQLGLEVGLMGEAHLVPFGSQCQLIPAYQGLMKLARNSGLVQDIYGHEVRINDRFDIVLGLHRSLMHEPLKQNGFPAADDERGAIVGFYVVAVFKDGTRTFYALSREQVEQVRDHSRGYQMARKLRKESPWDTHFVSMGLKTVIRRVCNLLPKSPELAMALAMDELNERGETQNLGVTEAIDGSWAPVLDEQPDDPGQASDPARASTRKPLADLLAGIGQALSLEALDEVYAQAEDAVAGDDLERLLRAYRSRKAALTPPLSPSSPIRGVVNNASA

SEQ ID NO: 217 - protein, 351 aa, Unknown
  Bifidobacterium reuteri DSM 23975
MGQLARSIQNRQLQAMPNDQERKQQFMTALEKDWPRIVASMPKHMTPDRIFQMYQSTLSREPKLRECTLNSVLSCFMKCAQLGLELSNADGLGKAYIIPFFNNKNNEMEATFLIGYRGMLQLARNSGEIKSMQAKAVYDGDEFHYQFGLHEDLVHIPAEKRPRNAKLTHVYFIALFKDGGHQLDVMTRDEVDAVRSRSKSKNNGPWVTDYEAMAIKSVIRRAFKMLPNSADVKEEVQQHVDAYTPDYSGILPSSPEGLPDSDADAPEEPSDIDGVLADGGTEQPAEEPDPVEVKRRDVIRRFQQLGVTSDAEACGTISKVLGREVKETGGLPEADLDVVLAQLKASVREGE

SEQ ID NO: 218 - protein, 352 aa, Serratia odorifera
MSTEIIEQKKNGIIDNVSILTNGDLFDRLMKISEVMAKSGAMVPQHFRDQPDACMAITMQAARWGMDPFVVAQKTHLVNGTLGYEAQLVNAIINSMAPTKDRIHFEWFGPWENILGCFVEKTGKSGNKYIAPGWSLADEKGVGVRAWATLKGEDEPRELVLYLSQAQVRNSTLWASDPRQQLAYLSVKRWARLYCPDVILGIYSDDELLEPTPRAEKDITPVASAVTELDSPPTSTEPDAGKAAELAEALSAALDEASTQEEAATIEQRIAKHKDALGSSLLFSLRGKAQKKRSGFRGVSEIDAAFSALDGTDNQKFQQLETLVANWKNALPPADYERFTLALDDLRPEYQQ

SEQ ID NO: 219 - protein, 359 aa, Unknown
  Persephonella marina (strain DSM 14350 / EX-H1)
METKTLAPPTALMGNVDYDKLMQQAGQLILRDREGKPYTNEQRALIVLAAQQLGLNPILGHLTIIQDRLYITNAGLLHIAHNSGKLQGIKTRPATEEERKAYFLGNNPKDIHLWRAEVYLKGQKEPYIGWGKASTNEKSWAVKSNPQEMAETRAVNRALRKAFNVAGYTSVEEIDEEPQFINEEDDEEPITQEQVKILHAIANLISKDFYDHEFKNWLREKTGKESSKELTKSEASDIADRLLTVLEDKLKFLADEAGINYYKLLNDKYSIGTLSETDNYYIWKEVRDYIEEAYKRKGLLKSILEVAQEKNISNEEIKQIIFKEFGKESSKQLTIDELERLLNIVENISFEPSDEDVPF

SEQ ID NO: 220 - protein, 363 aa, Unknown
  Parcubacteria group bacterium GW2011_GWA2_42_14
MSNFQNAVAIIAKQESKFMELVKAASTDVVFKQEMLYASQAMMNNDYLCKTAINNPLSLRNAFSQVAACGLTLNPSRGLCYLVPRDGQVILDVSYKGMIKTAVNDGAIRDCIVELVYSNDKFVYKGKRHSPVHEFDPFDLKEQRGEFRGVYVEVTLPDGRVHVEAVTAVDIYKARNASDLWTRKKKGPWVDFEDSMRKKSGIKIAKKYWPQVGEKLDSVIHYLNTDAGEGFASQDVPVSVVERYMGQVEQVEPAEPLPTSNETVPVVASVAVAEQAAATQSQPTPESEAKAPLQGTVDPNVEAAESALPERTLNKVEELVKRARNSGAWKAAHEYISTWPEIARDYATKKLKAAEYQLAASGE

SEQ ID NO: 221 - protein, 369 aa, Xanthobacter autotrophicus
MNALAPINVQSSAIRAMVPQTMDEVFHLADAVHRSGLAPTGLKNVQAVAIAIMTGLELGVPPMTALQRIAVINGRPTIWGDLAIALVRASGLAETIKEEILGEGDDRVAICTVKRKGDPQQVVGSFSVADAKRARLWDPREKVQRRRQDGNGTYEALNDAPWHRFPERMMKMRARAFALRDGFADVLGGLYLREELEEEQVDIRDVTPPTAPPPTITEEKKAPAPPAPAPAALAPPDPHVDLPSPLDRVTTPEVRDMVLNSPSAPAGLAQKAPAPPPPSVASVPAREERAPSPGEGAPRPDRAPSPAPFPNMAPHLVSLWAELGKCQNPTALENTWAFEEDDINTWSMADRESAAALYERRLAELCRKG

SEQ ID NO: 222 - protein, 369 aa, Unknown
  Ruminococcus sp SR1/5
MANEMTVQKTESLSNSEAFTNKVLKEFGSNVAGNIQVTDYQRQLIQGYFIATDRALKMAEEKRVSKNENNKDHKWDNLDPINWNTVDLNALALDVVHYARMGLDMMQDNHLSAIPFKDNNRLSRTGTKMYVVNLMPGYNGIQYIAEKYALEKPVSVTVELVYSTDTFKPLKKNRENRVESYDFEINNAFDRGEIVGGFGYIEYTEPTKNKLIIMTIKDILKRKPDKASGEFWGGKKTAWEKGQKVEVETEGWFEEMCLKTVKREVYSAKNMPRDPKKIDDAYEYMRMQEIRLAQMETQEVIDAEANQVVIDTEAQETPQKPAQPAFLTDDGGQQALDLGSPAKPQAQPQPARNTTAARSTATRAAGPTF

SEQ ID NO: 223 - protein, 374 aa, Unknown
  Sulfurovum sp FS06-10
MSKNEVTHVSQGQGAMIKSPFSAYALTEEQSNIIKTQIAPGITDGDLMYCLEIAKQAQLNPIIKEIYFVPRRSKIDNQWVTKHEPMIGRKGARSIARRKGMIVPPTTGYTLKQFPFLENGEWKEKRDLIGWAELEITGQKVRKEAAYSVFVQKTSEGAVTKFWSTMPTVMIEKVAEFQLLDAVYGLDGLMYMDAGYIEDESSSTQEMSSLADLGKIERELKSLNLEYHLVGDEIRIQDKGAFQFAAALKKEGFVYENSTKFWKIRVAMVENADIEAPKELPKPEPEQIDPKKELANAKKALMKVLLGNGLTKEEAGEFAQTLDVSNVDSINKLLPGNGGHDELIAKINVFLTPQSSQTHQDNLFDGDEEENPFG

SEQ ID NO: 224 - protein, 374 aa, Unknown
  Microgenomates group bacterium GW2011_GWF1_44_10
MEVKNELAIQFDKTKAVMRSEQAIERFAEALGSGQQAKRFIGSVLLVVSQSDRLMECTPQSIMVSGVRAATLKLSVDPSLGHAYIVPYKNKGIPTATFIIGYKGLKQLAYRTGQYAFINEKIVYDGQTIEEDDFSGIQRVRGIPTTYGKDGWKPIGYWMGFELKNGFRQTFYMTIEEVLAHAKRYSKTYDKVKKQFYPDSLWHTDFDVMAIKTVIRLGLSKYGYFDEDSLLAMAESSEFDDDLVVDGELIEDALEQEAEREQAREAEHAGKSTEQLSSLLGFEDPPDTSKKEPVKKAAAKEAVTKVKPKEYEVAASFNSKRLNKLYGEMSVEELQGEIMALTQYETKTQEEKVQVNDRIQAAKELIRYIESNVL

SEQ ID NO: 225 - protein, 375 aa, Mycobacterium marinum
MTEIATIDETTTDLIRGQVGFNSTQRAMLAQLGLSDAPEGDLILFSHVCQKSGLDPFRREIFMIGRNTQVTRYEKVDPDDPESNQRKVTRWETVYTIQTGIQGFRKRARELADEKGDRLGFDGPYWCGEDGNWKEIWPDTDKPVAAKYIVFRNGEPVPAVTHYSEYVQTTKVDGVAQPNSMWSKMPRNQLAKCAEALALQRAYPDELSGIVLEDAAQVIDSDGQIINETQRPPARARGAAALRDRAKAEAKPDDPEAVNADVVEPRHEDVASQPRPMSDGSRRKWLNRMFQLLGESDCTEQESQLTVIAKLANAPGIEHRDQLDDGQLKGVVNQLNQWEKSGQLVDKVADILDQAAIDEAQAAEQDAQQTIDGGN

SEQ ID NO: 226 - protein, 380 aa, Unknown
  Mameliella alba
MNTQIAKIPLRQVQDVKTLLHNDQARQQLAAVAAKHMSPERLMRVTANAIRTTPKLQEADPLSFLGALMQCAALGLEANTVLGHAYLVPFKNNRKGITEVQVIIGYKGFIDLARRSGHITSISAGIHYSDDELWEHEEGTEARLRHRPGPQEGEKLHAYAIAKFTDGGHAYVVLPWARVMKIRDGSQNWQSAVKFGKTKQSPWYTHEDAMASKTAIRALAKYLPLSVEMADAITIDHDEGTRVDYAAFAQSPEDGPQVEEGEEIDGEATEVDEGDRHQQDADPKGATGETEEKPNQKTKERKPEAKKEQDKPKDDDAGIPPASDPKFVKLFQDIEAELTDGAPARGILRFHEAALAEVEKEDPDLHGQIMSMIREAEAND

SEQ ID NO: 227 - protein, 382 aa, Unknown
  Gordonia soli NBRC 108243
MSSTEIATTTGAVATQPTSDLAIQPNQTEFTSVQRAALAQLGIEEATDEDVQVFFHQAKRTGLDPFARQIYMIGRRTKVKEWDPNQRKQIEKWVMKQTIQIGIDGYRLGGRRIASALGIKLEKDGPHWHDGNGWVDVWLDPARPPAAARYSITRDGETFTATAMYSEYVQTYNTQQGPQPNSMWSKMPANQLAKCAEAAAWRQAFPDQFSGVIFEDAAQHTVIDADVIEEEPKTKQGSRGTAGLAAALGVDESTADEPEPQDGPVGTIESGLISAEPSETPEDEADSSHEPRPEPKKPTQKQIHALNALLSQAGLTKAEKKGRQIVVSSFLPNREDPAAALTADETEHVTTQLSALVENQGEQALIDTVEALIQQHDQQGAE

SEQ ID NO: 228 - protein, 392 aa, Unknown
  Sphingopyxis sp (strain 113P3)
MNAQTQIATRADNPLAILKTQIDERAKEFQAALPSHISPEKFQRTILTAVQADPELLKASRKSLILACMKAANDGLLPDRREAALIVFKRNYKDAQGAWQQALEVQYLPMVFGLRKKILQSKEVTDIKPNVVYRREVEEGHFIYEEGTEAMLRHKPILDLTDEESSDDNIVVAYSIATYKDGTKSYEVMRRFEINKVQNCSQTGALIDKRGKPRTPSGPWVDWYPEQAKKTVMRRHSKTLPQSGDLVDVEGSEIDQQRAALSAMGALGAGEPIDATPVAPALPQADDLPDHDADTGEIIDTVTPDNPNAAEGRADEQHGDQHDGTEEPQGDEDQPYAATVSELIERAAAAGTVIDLNAVEKDWQKHMAALPDVENARIDTAVKERRDQLTAK

SEQ ID NO: 229 - protein, 394 aa, Unknown
  Actinobacteria bacterium OK074
MTVDTPVTWLAIREDQKAFEDQQLRALRAAFPDLVDASPAQLGIFFHYCKASGLDPFGRQIYMIKRKSRGEVRWTIQTGIDGYRLIARRAADRAGQSIAYEDFVWYDAEGGEHAVWLRDEPPVACRVVIWRGEARFPAVAHWREYAPKVWDYEAQEYKLGGLWPQMPASQFGKVAEALSLRRACPADLSGLHVDEEMHAADAAESRERVKEAAARLRSPDEQQANGGSPAQPTSDVVDAEIVESQTANTDAAAPQEEQRADKAAEPPASGRTDEVDRVRERMSALDQERSRLEEARARIRETADRLALGFDTVNDRCFDAFGTSFQDASAEQLSELNDSLTPAAGTSDEPATAGRRNGSARRTRTPAKKAAASAKKKTARKATDGTTSPTRVSK

SEQ ID NO: 230 - protein, 417 aa, Unknown
  Rhizobium sp CF080
MNSLTTVEAGRLIDGLRVELEPLVLDSGKSFDRLRSVFMIAVQQNPDILKCSENSIKREISKCAADGLVPDNKEAAMIPYKGELQYQPMVQGIIKRMKELGGVFNIVCNLVFEKDVFTLDESDPDSLSHVSDRFATDRGKVVGGYVVFRDEHKRVMHLETMSIVDFENVRKASKAPDSPAWKNWTNEMYKKAVLRRGAKYISVNNDKIRALLERQDELFDFTPNRVVERTNPFTGEVIEGNATPSIENKQQPPMQQPRETQPAGSQQEPRQQRINNTGDGRASRKQERQPENKDAGNTQQTKTETKKDLVPPAVPEVDVFPADKAKAAEAAEKLLGVALLPDLDPRGRRGVLKQAAVDWKEATPAYTHPLLKACIDMSDWAIQQQVKEEAWAGEHAMFVHKIKSLLDVEKLNVGKYP

SEQ ID NO: 231 - protein, 420 aa, Unknown
  Bradyrhizobium sp STM 3843
MNSARGWWLDKNLVKLARRTAFKETNEDEFDQAVAFCREKNLSPMSGQLYAFVFNKDDAKKRNMVIVTSIMGYRAIANRSGDYMPGPTKAFFDPGAKNSLINPRGLVRAEGGADRFIHGGWKNVTEEALWESFAPIIKSGSDDDAYEWVDTGEVWADSGKPKKKRRLRQGAEVQEILDPKKEGWHRMPDVMLKKCAEAAALRRGWPEDLSGLYVEEEVHRSQVIDADYVDLTPSEMVAKAETDARIEKIGGPSIFAAFDAAGTLERVEIGKFFDRVDAHTRNLKPEDVASFAVRNREALREFWGRAKNDALTLKTILETRSSAATPASQANGHDGAAGTAAPRSESQTDSGPDTGAADPSLSSDAAAKLKSALLADVAQLRTRSDFDSWERDAKAHLEKLPEQMRSEVQAELDHRRADIR

SEQ ID NO: 232 - protein, 425 aa, Unknown
  Nitratireductor basaltis
MNQIATSTQRELAEKDKFRQQMKGQSEAFCEALIGSNIPPEKFQRVVATAVMTDTNILFADRKSLMEATMRAAQDGLLPDKREGAFVLFKNRVQWMPMIGGIIKKIHQSGDISLITAKVVYGGDTYRTWVDDEGEHVLYEPAEEPDHNVIRQVFAMAKTKDGTLYVEALTTRDIEKIRSVSRSGEKGPWKDWWEEMAKKSAIRRLAKRLPLSSDIHDLIQRDNEMYDLSRAPEPRQSVMARFRASATPQIEMDRGEGFDIDHITRETGTLTSEDAEQVSSASPSLADEGDGADPAPETPSTVATESEPAEAADQAEEASTEQASTPEASHGDEAGASSAVNPQTYAAMTECIDRLLGAATDTSGGDVEKRKEKVEKFAAAWCNELPDHTAFVDKCKDTALRIAEKPAERAKAEEYLKAKLPEVEA

SEQ ID NO: 233 - protein, 427 aa, Unknown
  Lentibacillus amyloliquefaciens
MEKAIQFSNSEKSLIWKRFIEPAKGTQEEAEHFLEVCENFGLNPLLGDIVFQRYETKRGAKTQFITTRDGLLRVATSQPGYVGPPNANVVKEGDHFEFLPSEGTVRHKFGTKRGQILGAYAIMQHKKHNPVAVFVDFEEYFLANSGRQNSRYGNPNVWDTLPSAMIIKIAETFVLRRQFPLGGLYTQEEMGLDDNLQTEDAKETASPDKQHSAQTKPAAKEPEKEVSQPGDDVIHQEMVVKSYDIKTSSSKKQYGVLSVQSKTSNQAVQVLIRDKSLMKSLQHVSAGEILNLELYEENSFYFLKDYAERASVDNQQKDEKEENQKGESSKETDGPAKAPQENEQSEAGYPYEVMIQNVKFGEKASEKFAKITGVIDGQTQLMLARGEQAVQKADGLEQGDNVTLSLKKENGFLFLVDLVEETQQRAG

SEQ ID NO: 234 - protein, 461 aa, Oligotropha carboxidovorans
MAKTETRERTQADHRSAEPAPNVNVPAQKSNHPVAVFREYAMQRISTLQELPHIDPQQLLSVALTAIQRKPDLMRCTPQSLWNACVLAAQDGLLPDGREGAIVPYGENADGKRVAEIATWMPMVEGLRKKVRNSGQIKDWYVELVYAGDFFRYRKGDDPRLEHEPVPPSQRTPNTPFHGIVAAYSIAVFTDGSKSAPEVMWIEEIEKVRTKSKAKNGPWQDSAFYPEMCKKVVARRHYKQLPHSAGMDKLIQRDDDDYDFDRQDEALVQQRQHRRLVSTTSAFDEFARNGQTIDHRASDPVHQDGDDEFAEDEPSHDETGADETDRTSANSKPETGGAADQREEAAVNSKDEQQQHAEPQQQTQAEQTTANDGKPAAKFDPHVGEEVRRWPPGAVPSDPDEYEFYVETKLSDYTRETADKIPDWWKSAEEKKLREACGISKQRHDELRNKAASRKTELLKG

SEQ ID NO: 235 - protein, 163 aa, Unknown
  Streptococcus pyogenes serotype M28 (strain MGAS6180),Streptococcus pyogenes, Temperate phage phiNIH11,Streptococcus pyogenes serotype M2 (strain MGAS10270),Streptococcus pyogenes serotype M3 (strain ATCC
MINNVVLVGRMTKDAELRYTPSQVAVATFTLAVNRTFKSQNGEREADFINCVIWRQPAENLANWAKKGALIGVTGRIQTRNYENQQGQRVYVTEVVADNFQMLESRATREGGSTGSFNGGFNNNTSSSNSYSAPAQQTPNFGRDDSPFGNSNPMDISDDDLPF

SEQ ID NO: 236 - protein, 139 aa, Unknown
  Streptococcus pyogenes STAB902,Streptococcus pyogenes, Streptococcus pyogenes serotype M3 (strain ATCC BAA-595 / MGAS315)
MINNVVLVGRMTKDAELRYTASQVAVATFTLAVNRRFKEQNGEREADFINCVIWRQSAENLANWAKKGALIGVTGRIQTRNYENQQGQRVYVTEVVADNFQMLESRNQQSGQGNSSQNDNSQPFGNSNPMDISDDDLPF

SEQ ID NO: 237 - protein, 172 aa, Bacillus subtilis
MLNRVVLVGRLTKDPELRYTPNGAAVATFTLAVNRTFTNQSGEREADFINCVTWRRQAENVANFLKKGSLAGVDGRLQTRNYENQQGQRVFVTEVQAESVQFLEPKNGGGSGSGGYNEGNSGGGQYFGGGQNDNPFGGNQNNQRRNQGNSFNDDPFANDGKPIDISDDDLPF

SEQ ID NO: 238 - protein, 621 aa, Saccharomyces cerevisiae
MSSVQLSRGDFHSIFTNKQRYDNPTGGVYQVYNTRKSDGANSNRKNLIMISDGIYHMKALLRNQAASKFQSMELQRGDIIRVIIAEPAIVRERKKYVLLVDDFELVQSRADMVNQTSTFLDNYFSEHPNETLKDEDITDSGNVANQTNASNAGVPDMLHSNSNLNANERKFANENPNSQKTRPIFAIEQLSPYQNVWTIKARVSYKGEIKTWHNQRGDGKLFNVNFLDTSGEIRATAFNDFATKFNEILQEGKVYYVSKAKLQPAKPQFTNLTHPYELNLDRDTVIEECFDESNVPKTHFNFIKLDAIQNQEVNSNVDVLGIIQTINPHFELTSRAGKKFDRRDITIVDDSGFSISVGLWNQQALDFNLPEGSVAAIKGVRVTDFGGKSLSMGFSSTLIPNPEIPEAYALKGWYDSKGRNANFITLKQEPGMGGQSAASLTKFIAQRITIARAQAENLGRSEKGDFFSVKAAISFLKVDNFAYPACSNENCNKKVLEQPDGTWRCEKCDTNNARPNWRYILTISIIDETNQLWLTLFDDQAKQLLGVDANTLMSLKEEDPNEFTKITQSIQMNEYDFRIRAREDTYNDQSRIRYTVANLHSLNYRAEADYLADELSKALLA

SEQ ID NO: 239 - protein, 273 aa, Saccharomyces cerevisiae
MATYQPYNEYSSVTGGGFENSESRPGSGESETNTRVNTLTPVTIKQILESKQDIQDGPFVSHNQELHHVCFVGVVRNITDHTANIFLTIEDGTGQIEVRKWSEDANDLAAGNDDSSGKGYGSQVAQQFEIGGYVKVFGALKEFGGKKNIQYAVIKPIDSFNEVLTHHLEVIKCHSIASGMMKQPLESASNNNGQSLFVKDDNDTSSGSSPLQRILEFCKKQCEGKDANSFAVPIPLISQSLNLDETTVRNCCTTLTDQGFIYPTFDDNNFFAL

SEQ ID NO: 240 - protein, 122 aa, Saccharomyces cerevisiae
MASETPRVDPTEISNVNAPVFRIIAQIKSQPTESQLILQSPTISSKNGSEVEMITLNNIRVSMNKTFEIDSWYEFVCRNNDDGELGFLILDAVLCKFKENEDLSLNGVVALQRLCKKYPEIY

SEQ ID NO: 241 - protein, 184 aa, Unknown
  Staphylococcus phage phi11 (Bacteriophage phi-11),Staphylococcus phage 80,Staphylococcus phage 52A,Staphylococcus aureus (strain NCTC 8325)
MKITGRTQYIQETNQEAFMKGGDFLGAGEFTVKVANVEFNDRENRYFTIVFENNEGKQYKHNQFVPPFQQDYQEKQYIELLSRLGIKLNLPDLTFDTDQLINKIGTIVLKNKFNEEQGKYFVRLSYVKVWNKDDEVVNKPEPKTDEMKQKEQQANGKQTPMSQQSNPFANANGPIEINDDDLPF

SEQ ID NO: 242 - protein, 176 aa, Unknown
  Salmonella typhimurium, Salmonella phage ST160,Salmonella phage ST64T (Bacteriophage ST64T)
MASRGVNKVILVGNLGQDPEVRYMPSGGAVANLTLATSESWRDKQTGEMKEQTEWHRVVMFGKLAEVAGEYLRKGSQVYIEGQLRTRKWTDQSGQERYTTEINVPQIGGVMQMLGGRQGGGAPAGGQQQGGWGQPQQPQQPQGGNQFSGGAQSRPQQSAPAPSNEPPMDFDDDIPF

SEQ ID NO: 243 - protein, 188 aa, Enterococcus faecalis
MINNVVLVGRLTKDPDLRYTASGSAVATFTLAVNRNFTNQNGDREADFINCVIWRKPAETMANYARKGTLLGVVGRIQTRNYENQQGQRVYVTEVVCENFQLLESRSASEQRGTGGGSFNNNENGYQSQNRSFGNNNASSGFNNNNNSFNPSSSQSQNNNGMPDFDKDSDPFGGSGSSIDISDDDLPF

SEQ ID NO: 244 - protein, 171 aa, Unknown
  Acyrthosiphon pisum secondary endosymbiont phage 1 (BacteriophageAPSE-1)
MASRGVNKVILIGHLGQDPEVRYMPNGNAVVNMTLATSENWKDKNTGENKEKTEWHRIVLFGKLAEIAGEYLRKGSQVYIEGSLQTRKWQDQNGLERYTTEIIVNIGGTMQMLGNRNSNLQAMTVNDKNSTGIKIKKTDAVEFDKKIETHESNKDLTHSPSEIDFDDEIPF

SEQ ID NO: 245 - protein, 159 aa, Bacteriophage SPP1
MNSVNLVGRLAADPELRHTNNGTAVVNFIMAVRRNRKDPTTGQYEADFIRCQAWRGIAEVIANNFGTGRMIGVSGSWRTGAFEGQDGKRVYTNDCVVENITFVDPNKSDSSSPDNSQGSSNTNTFGGSQNGSGGQGGYNNDPFANDGKTIDINESDLPF

SEQ ID NO: 246 - protein, 171 aa, Bacteriophage LL-H
MAGINNVVLVGRLTKDVNLRSTQSGTMVGTFTLAVDRTTKDQNGNRQADFIKCVVWNNKYSKMAENLATYAHKGSLIGVQGRIQTRNYDNKDGQRVDVTEVRVDNFSLLESRNSAQREYTGQQGGYSQQQGNQPQGNYQASQAANFGQQGQFTAPAGQSDTIDVSNDDLPF

SEQ ID NO: 247 - protein, 162 aa, Unknown
  Escherichia phage Rtp
MAQRGVNKVILIGTLGQDPEIRYIPNGGAVGRLSIATNESWRDKQTGQQKEQTEWHKVVLFGKLAEIASEYLRKGSQVYIEGKLKTRKWTDDAGVERYTTEIIVSQGGTMQMIGARRDDSQSSNGWGQSNQPQNHQQYSGGGKPQSNANNEPPMDFDDDIPF

SEQ ID NO: 248 - protein, 148 aa, Unknown
  Streptococcus phage 7201
MINNTVLVGRLTKDPEFKYTGSNIAVASFSLAVNRNFKDANGEREADFINCVIWRQQAENLANWAKKGALIGITGRIQTRSYENQQGQRVYVTEVVAENFQMLESRAAREGGNANNSYSQQQVPNFARKNTEYSNKQPLDISSDDLPF

SEQ ID NO: 249 - protein, 170 aa, Unknown
  Bacillus phage 0305phi8-36
MSNELKQVEQTEEAVVVSETKDYIKVYENGKYRRKAKYQQLNSMSHRELTDEEEINIFNLLNGAEGSAVEMKRAVGSKVTIVDFITVPYTKIDEDTGVEENGVLTYLINENGEAIATSSKAVYFTLNRLLIQCGKHADGTWKRPIVEIISVKQTNGDGMDLKLVGFDKKK

SEQ ID NO: 250 - protein, 160 aa, Bacteriophage A118
MMNRVVLVGRLTKDPDLRYTPAGAAVATFTLAVNRMFTNQNGEREADFINCVVWRKPAENVANFLKKGSMAGVDGRVQTRNYEDNDGKRVFVTEVVAESVQFLEPKNNNVEGATSNNYQNKANYSNNNQTSSYRADTSQKSDSFASEGKPIDINEDDLPF

SEQ ID NO: 251 - protein, 141 aa, Unknown
  Lactococcus phage bIL286,Lactococcus lactis subsp lactis (strain IL1403) (Streptococcuslactis)
MINNVTLVGRITKEPELRYTPQNKAVATFTLAVNRAFKNANGEREADFINCVIWGKSAENLANWTHKGQLIGVTGSIQTRNYENQQGQRVYVTEVIANNFQVLEKSNQANGERVSNPAAKPQNNDSFGSDPMEISDDDLPF

SEQ ID NO: 252 - protein, 119 aa, Unknown
  Lactococcus phage SK1833,Lactococcus phage SK1
MAIITVTAQANEKNTRTVSTAKGDKKIISVPLFEKEKGSSVKVAYGSAFLPDFIQLGDTVTVSGRVQAKESGEYVNYNFVFPTVEKVFITNDNSSQSQAKQDLFGGSEPIEVNSEDLPF

SEQ ID NO: 253 - protein, 165 aa, Unknown
  Mycobacterium phage Che8 / Mycobacterium smegmatis
MAGDTTITVVGNLTADPELRFTPSGAAVANFTVASTPRMFDRQSGEWKDGEALFLRCNIWREAAENVAESLTRGSRVIVTGRLKQRSFETREGEKRTVVEVEVDEIGPSLRYATAKVNKASRSGGGGGGFGSGGGGSRQSEPKDDPWGSAPASGSFSGADDEPPF

SEQ ID NO: 254 - protein, 166 aa, Ureaplasma urealyticum
MNKVILIGNLVRDPEARQIPSGRLVTNFTIAVNDNTPNANANFIRCVAWNNQANFLTTYLKKGDAIAIEGRIVSRSYVDNNGKTNYVTEVYADQVQSLSRRNQSPSDNNKVNVDTMMESYTGINTDAAFSSNKPQTTLSSTTSNLNKNNDEEDEITSWINLDDDLE

SEQ ID NO: 255 - protein, 166 aa, Unknown
  Lactococcus lactis subsp lactis bv diacetylactis str TIFN2,Lactococcus lactis subsp lactis (strain IL1403) (Streptococcuslactis),Lactococcus phage bIL309
MINNVVLVGRITRDPELRYTPQNQAVATFSLAVNRQFKNANGEREADFINCVIWRQQAENLANWAKKGALIGVTGRIQTRNYENQQGQRVYVTEVVADSFQMLESRSAREGMGGGTSAGSYSAPSQSTNNTPRPQTNNNNATPNFGRDADPFGSSPMEISDDDLPF

SEQ ID NO: 256 - protein, 172 aa, Rhizobium loti
MAGSVNKVILVGNLGADPEIRRLNSGEPVVNIRIATSESWRDKNSGERKEKTEWHNVVIFNEGIAKVAEQYLKKGMKVYVEGQLQTRKWQDQTGADKYTTEVVLQRFRGELQMLDGRQGEGGQVGGYSGGGSSRGSDFGQSGPNESFNRGGGAPRGGGGGGSSRELDDEIPF

SEQ ID NO: 257 - protein, 121 aa, Homo sapiens
MVDMMDLPRSRINAGMLAQFIDKPVCFVGRLEKIHPTGKMFILSDGEGKNGTIELMEPLDEEISGIVEVVGRVTAKATILCTSYVQFKEDSHPFDLGLYNEAVKIIHDFPQFYPLGIVQHD

SEQ ID NO: 258 - protein, 616 aa, Homo sapiens
MVGQLSEGAIAAIMQKGDTNIKPILQVINIRPITTGNSPPRYRLLMSDGLNTLSSFMLATQLNPLVEEEQLSSNCVCQIHRFIVNTLKDGRRVVILMELEVLKSAEAVGVKIGNPVPYNEGLGQPQVAPPAPAASPAASSRPQPQNGSSGMGSTVSKAYGASKTFGKAAGPSLSHTSGGTQSKVVPIASLTPYQSKWTICARVTNKSQIRTWSNSRGEGKLFSLELVDESGEIRATAFNEQVDKFFPLIEVNKVYYFSKGTLKIANKQFTAVKNDYEMTFNNETSVMPCEDDHHLPTVQFDFTGIDDLENKSKDSLVDIIGICKSYEDATKITVRSNNREVAKRNIYLMDTSGKVVTATLWGEDADKFDGSRQPVLAIKGARVSDFGGRSLSVLSSSTIIANPDIPEAYKLRGWFDAEGQALDGVSISDLKSGGVGGSNTNWKTLYEVKSENLGQGDKPDYFSSVATVVYLRKENCMYQACPTQDCNKKVIDQQNGLYRCEKCDTEFPNFKYRMILSVNIADFQENQWVTCFQESAEAILGQNAAYLGELKDKNEQAFEEVFQNANFRSFIFRVRVKVETYNDESRIKATVMDVKPVDYREYGRRLVMSIRRSALM

SEQ ID NO: 259 - protein, 270 aa, Homo sapiens
MWNSGFESYGSSSYGGAGGYTQSPGGFGSPAPSQAEKKSRARAQHIVPCTISQLLSATLVDEVFRIGNVEISQVTIVGIIRHAEKAPTNIVYKIDDMTAAPMDVRQWVDTDDTSSENTVVPPETYVKVAGHLRSFQNKKSLVAFKIMPLEDMNEFTTHILEVINAHMVLSKANSQPSAGRAPISNPGMSEAGNFGGNSFMPANGLTVAQNQVLNLIKACPRPEGLNFQDLKNQLKHMSVSSIKQAVDFLSNEGHIYSTVDDDHFKSTDAE

SEQ ID NO: 260 - protein, 148 aa, Homo sapiens
MFRRPVLQVLRQFVRHESETTTSLVLERSLNRVHLLGRVGQDPVLRQVEGKNPVTIFSLATNEMWRSGDSEVYQLGDVSQKTTWHRISVFRPGLRDVAYQYVKKGSRIYLEGKIDYGEYMDKNNVRRQATTIIADNIIFLSDQTKEKE

SEQ ID NO: 261 - protein, 232 aa, Bacteriophage T1
MAKKIFTSALGTAEPYAYIAKPDYGNEERGFGNPRGVYKVDLTIPNKDPRCQRMVDEIVKCHEEAYAAAVEEYEANPPAVARGKKPLKPYEGDMPFFDNGDGTTTFKFKCYASFQDKKTKETKHINLVVVDSKGKKMEDVPIIGGGSKLKVKYSLVPYKWNTAVGASVKLQLESVMLVELATFGGGEDDWADEVEENGYVASGSAKASKPRDEESWDEDDEESEEADEDGDF

SEQ ID NO: 262 - protein, 178 aa, Escherichia coli
MASRGVNKVILVGNLGQDPEVRYMPNGGAVANITLATSESWRDKATGEMKEQTEWHRVVLFGKLAEVASEYLRKGSQVYIEGQLRTRKWTDQSGQDRYTTEVVVNVGGTMQMLGGRQGGGAPAGGNIGGGQPQGGWGQPQQPQGGNQFSGGAQSRPQQSAPAAPSNEPPMDFDDDIPF

SEQ ID NO: 263 - protein, 146 aa, Unknown
  Mycobacterium phage PhatBacter, M. phage Elph10, M. phage 244, M. phage Cjw1, M. phage Phrux, M. phage Lilac, M. phage Phaux, M. phage Quink, M. phage Pumpkin, M. phage Murphy
MSKDLQVHLVGTLTADPELRFTQGGQAVANFTVVSNERRRDAQGNWVDGDATFLRCTIWRDAAENVAESLQKGQRVIVHGYLKQRSFETKEGDKRTVIEVEVDEIGPSLRWATARVSKVGGNSNGGGSSSFKEADANKWGDDDVPF

SEQ ID NO: 264 - protein, 170 aa, Unknown
  Bacillus thuringiensis Sbt003,Escherichia coli \'BL21-Gold(DE3)pLysS AG\',Enterobacteria phage HK630,Enterobacteria phage lambda (Bacteriophage lambda),Escherichia coli TA280,Escherichia coli
MMNRVILVGRLTKDPDLRYTPNGVAVATFTLAVNRAFANQQGEREADFINCVIWRKQAENVANYLKKGSLAGVDGRLQTRNYEGQDGKRVYVTEVLAESVQFLEPRNGGGEQRGSFNQQPSGAGFGNQGSNPFGQSSNSGNQGNSGFTKNDDPFSNVGQPIDISDDDLPF

SEQ ID NO: 265 - protein, 166 aa, Unknown
  Bordetella phage BPP-1
MASVNKVILVGNLGRDPEVRYSPDGAAICNVSIATTSQWKDKASGERREETEWHRVVMYNRLAEIAGEYLKKGRSVYIEGRLKTRKWQDKDTGADRYSTEIVADQMQMLGGRDSGGDSGGGYGGGYDDAPRQQRAPAQRPAAAPQRPAPQAAPAANLADMDDDIPF

SEQ ID NO: 266 - protein, 169 aa, Unknown
  Burkholderia phage BcepNazgul
MASVNKVILVGNLGADPEVRYLPSGDAVANIRLATTDRYKDKASGDIKEATEWHRVSFFGRLAEIVDEHLRKGASVYIEGRIKTRKWQDQSGQDRYTTEIVADRMQMLGKPGGSRDDSGDQQQRQHGGQQQRGGGRNGYADATGRAQPQRTAEQRGASGFDDMDDSIPF

SEQ ID NO: 267 - protein, 178 aa, Photorhabdus luminescens
MASRGINKVILIGNLGQDPEVRYMPNGGAVTNITLATSESWRDKQTGEMKEKTEWHRVVLFGKLAEVAGEYLRKGSQVYIEGSLQTRKWQDQNGQERYTTEVVVNMGGTMQMLGGRAGGGSFQDSQQSQGGGWGQPQQPQPQQQSQQFSGGGAPSRPAQSSAPQSNEPPMDFDDDIPF

SEQ ID NO: 268 - protein, 187 aa, Photobacterium sp. SS9
MELSMASRGVNKVILVGNLGNDPEIRYMPSGSAVANITIATSESWRDKATGEQREKTEWHRVALFGKLAEVAGEYLRKGSQVYIEGQLQTRKWQNQQGQDQYTTEVVVQGFNGVMQMLGGRQGGGQQQQQQQQQGNWGKPQQPAAAPQQSVAPQQQQQAPQQPQQAPQQPQQQYNEPPMDFDDDIPF

SEQ ID NO: 269 - protein, 185 aa, Unknown
  Lactobacillus phage Lc-Nu
MAITMDYSQAAEGNGDIQDGVYECVINRFGFDNYKDREFIKFDLIVRNDVPQKYQNKHIFDNFYPKKDTGEYAMGYLFMIGKNAGIPDHKAWSDLAAMLADFTGHAVKVTVKNEEYNGKTYPHIKKWEPTAFPQIQHRWKDSKDESSSNSNPSFGTPAQTSQTNTSDPFANSGQPIDVSDDDLPF

SEQ ID NO: 270 - protein, 188 aa, Leuconostoc mesenteroides
MINRVVLIGRLTRDVELRYTQSGVAVGTFSLAVNRQFTNASGEREADFINAVIWRKAAENFANFTGKGALVAVEGRLQTRNYENNAGQRVYVTEVVVDNFSLLESRAESEKRRSQNGSSASNNGADNFSGSNDHSFGGNDNSFNGVDPFASASSNSNTQSSASSNSAPNPFAASGNTEIDISDDDLPF

SEQ ID NO: 271 - protein, 156 aa, Unknown
  Staphylococcus phage 3A,Staphylococcus phage phi7401PVL,Streptococcus pneumoniae, Staphylococcus aureus (strain NCTC 8325),Staphylococcus phage Phi12,Staphylococcus aureus,Staphylococcus phage 47,Staphylococcus phage tp310-2
MLNRTILVGRLTRDPELRTTQSGVNVASFTLAVNRTFTNAQGEREADFINIIVFKKQAENVNKYLSKGSLAGVDGRLQTRNYENKEGQRVYVTEVVADSIQFLEPKNSNDTQQDLYQQQVQQTRGQSQYSNNKPVKDNPFANANGPIELNDDDLPF

SEQ ID NO: 272 - protein, 175 aa, Unknown
  Escherichia phage Tls
MAVRGINKVILVGRLGKDPEVRYIPNGGAVANLQVATSETWRDKQTGEMKEQTEWHRVVLFGKLAEVAGEYLRKGAQVYIEGQLRTRSWEDNGITRYVTEILVKTTGTMQMLGSAPQQNAQVQPQPQQNGQSQSADATKKGSAKTKGRGRKAAQPEPQPQPPEGEDYGFSDDIPF

SEQ ID NO: 273 - protein, 170 aa, Unknown
  Leifsonia xyli subsp xyli,Leifsonia xyli subsp xyli (strain CTCB07)
MAGETVITVVGNLTSDPELRYTQNGLAVANFTIASTPRTFDRQANEWKDGEALFLRASVWRDFAEHVAGSLTKGSRVIAQGRLKQRSYETKEGEKRTSIELEIDEIGPSLRYATAQVTRAQSSRGPGGPGGFGGGAPAVEEPWAATVPADPSAGTDVWNTPGAYNDETPF

SEQ ID NO: 274 - protein, 162 aa, Legionella pneumophila
MISMARGINKVILVGNVGADPDVRYLPNGNAVTTLSVATSETWKDKTTGEKQDRTEWHRVVCFNRLGEIAGEYIRKGSKLYVEGSLRTRKWQDQQGQDRYTTEIVASDIQMLDSKGSSATNYDDMPSFQGTSTPQQASTKNQATPTSTAQDAFDELDDDIPF

SEQ ID NO: 275 - protein, 178 aa, Nocardia farcinica
MAGDTVITVIGNLTADPELRFTPAGQAVANFTVASTPRVFDRNTNEWKDGEALFLRCNIWREAAENVAESLTRGARVIVSGRLKQRSYETREGEKRTVVELEVDEVGPSLRYATAKVNKASRGGGGGGGFGGGGGGGYASDRSGGGGSRSGAAEDDPWGSAPAAGSFGGGRMDDEPPF

SEQ ID NO: 276 - protein, 172 aa, Bacteriophage SFi21
MINNVVLVGRMTRDAELRYTPSNVAVATFSLAVNRNFKGANGERETDFINCVIWRQQAENLANWAKKGALVGITGRIQTRNYENQQGQRVYVTEVVADNFQMLESRAAREGHSGGSYNVGGFDNSNSFGGGASTGGSFGESQPAQSTPNFGRDESPFGNSNPMDISDDDLPF

SEQ ID NO: 277 - protein, 182 aa, Campylobacter coli
MFNKVVLVGNLTRDIEMRYGQNGNAIGASAIAVTRRFTTNGERREETCFIDISFYGRTAEVANQYLSKGSKVLIEGRLRFEQWNDQNGQMRSKHSVQVENMEMLGNNPQQGGNFNNGGNNYGANNNYSNYENQSYDPYMSENNFKKAPQQAQTKTQNPNQNQEKIKEIDVDAYDSDDTDLPF

SEQ ID NO: 278 - protein, 140 aa, Unknown
  Staphylococcus phage 92
MLNRVVLVGRLTKDPEYRTAPNGVSVTTFTIAVNRTFTNAQGEREADFINCVTFRKQAENVKNYLSKGSLAGVDGRLQTRNYENKDGQRVYVTEVVADSVQFLEPKNSNQQNNQQHNEQTQTGNNPFDNTTAITDDDLPF

SEQ ID NO: 279 - protein, 143 aa, Pelobacter propionicus
MASLNKVMLIGNLGRDPEVRYTASGQAVASFNLATTEKFKNRNGEWEERTEWHRVTLWARLAEIAGEYLSKGKTVYIEGRLQTREYEKDGIKRYTTEIVGEKMQMLSPKGERRSSGDSYSPAPAGTSGGGYEPPPFQDDDIPF

SEQ ID NO: 280 - protein, 149 aa, Clostridium beijerinckii
MNKVVLIGRLTKDPELRFTPGSGAAVTTLTLAVDKYNTKTGQREADFVPVVVWGKQAESTANYMSKGSQVAISGRIQTRSYDAKDGTKRYVTEVVADQFGGVEFLGSKGSNSSGNSFGNSNEYSAPANDAFSGGFEEDITPVDDGDMPF

SEQ ID NO: 281 - protein, 175 aa, Unknown
  Sodalis glossinidius (strain morsitans)
MASRGVNKVILVGNLGQDPEVRHMPNGGAVANITLATSESWRDKQTGETKEKTEWHRVVLFGKLAEVAGEYLRKGSQVYIEGSLQTRKWQDQSGQDRYTTEVVVNVGGTMQMLGGRQGGAAASGGQQSGWGLPQQPQGNNAQFSGGNAPASRRAQNSAPAPSNEPPMDFDDDIPF

SEQ ID NO: 282 - protein, 180 aa, Xanthobacter autotrophicus
MAGSVNKVILVGNLGRDPEIKSFQNGGRVCNLSVATSENWRDKASGERRERTEWHRVVIFNENLAGVAERFLKKGSKVYIEGQLETRKYEKDGRETYTTEIVLRPYRGELTLLDGRGEGAGAGGDDYAAGSDFGSASPMGGGYGGGSGGSRRMSGAPAGSSGGVAGGGRPAADLDDEIPF

SEQ ID NO: 283 - protein, 135 aa, Unknown
  Clostridium phage phiC2,Peptoclostridium difficile E15,Clostridium phage phiMMP03,Peptoclostridium difficile (Clostridium difficile)
MNTITLVGRLVADAELKYLPNSGTPKITFSMAVDRRFKDKNGNKITDFIQCEQLGKHVENLVQYLVKGKPIYAVGELNIYNYKDENGCWKSITKVNVNALELLSSKNDNNAKQEYVPPGLDPQGFQAIDDDDIPF

SEQ ID NO: 284 - protein, 162 aa, Bacteriophage HK022
MAQRGVNKVILIGTLGQDPEIRYIPNGGTVGRLSIATNESWRDKQTGQQKEQTEWHRVVLFGKLAEIASEYLRKGSQVYIEGKLKTRKWTDDAGVERYTTEIIVSQGGTMQMIGARRDDSQFSNGWGQSNQPQNHQQYSGGSKPQSNANSEPPMDFEDDIPF

SEQ ID NO: 285 - protein, 146 aa, Unknown
  Mycobacterium phage Wildcat
MSKDLQVHLVGTLTADPELRFTQGGQAVANFTVVSNERRRDAQGNWVDGDATFLRCTIWRDAAENVAESLQKGQRVIVHGYLKQRSFETKEGDKRTVIEVEVDEIGPSLRWATARVSKVGGNSNGGGSSSFKEADANKWGDDEPPF

SEQ ID NO: 286 - protein, 181 aa, Unknown
  Streptococcus phage MM1 1998,Streptococcus pneumoniae, Streptococcus phage MM1
MINNVVLVGRLTRDAELRYTQSNIAVATFTLAVNRPFKNEAGEREADFINCVIWRQLAENLANWAKKGSLIGVTGVIQTRSYDNQQGQRVYVTEVVASNFQLLESRNSQQNNQGHQDHHGGYQQQGYSNQGSSFQNGNSYGQQGSFVEGNTTNLVPDFTRDNNPFGRPTNPLDISDDDLPF

SEQ ID NO: 287 - protein, 165 aa, Lactococcus bacteriophage c2
MSINNVTLVGRLVRDPELKNTAQGIANVSFTLAVNRNYKNDQGQREADFINVVIWRKQAELLAQYATKGALIGITGRIQTRNYENQQGQRIYVTEVVADNFQLLESRGAQQGGQQQQQNQGYGQQQNQRPQGNYQSNPRNNQQRQNQPDPFRGSPMEISDDDLPF

SEQ ID NO: 288 - protein, 169 aa, Unknown
  Salinispora tropica (strain ATCC BAA-916 / DSM 44818 / CNB-440)
MAGDTIITVIGNLTDDPELRFTPSGAAVAKFRVASTPRFFDKSSSEWKDGEPLFLSCTVWRQAAEHVAESLQRGTRVIVSGRLRQRSYETREGEKRTVIELEVDEIGPSLRYATAKVQKMSRSGGGGFGGGGGQGGGGNFDDPWASAAPAPAPSRGGSGGGNFDEEPPF

SEQ ID NO: 289 - protein, 159 aa, Stigmatella aurantiaca
MAGGVNKVILIGNLGADPEVRFTPGGQAVANFRIATSDSWTDKNGQKQERTEWHRIVVWGKLAELCGEYLKKGRQCFVEGRLQTREWTDKENRKNYTTEVVASSVTFLGGRDAGEGSGMGSRRGGGASSRGGEPDYGAPPPGMDDGMNQGGSGDDDIPF

SEQ ID NO: 290 - protein, 177 aa, Unknown
  Listeria welshimeri serovar 6b (strain ATCC 35897 / DSM 20650 /SLCC5334),Listeria phage PSA
MMNRVVLVGRLTKDPELRYTPAGVAVATFTLAVNRTFTNQQGEREADFINCVVWRKPAENVANFLKKGSMAGVDGRVQTRNYEGNDGKRVYVTEIVAESVQFLEPRNSNGGGGNNYQGGNNNNYNNGGSNSGQAPTNNGGFGQDQQQSQNQNYQSTNNDPFASDGKPIDISDDDLPF

SEQ ID NO: 291 - protein, 156 aa, Unknown
  Gramella forsetii (strain KT0803)
MTGTLNKVMLIGHTGDDVKMHYFEGGGSIGRFPLATNESYTNRTTGERVTNTEWHNVVVRNKAAEVCEKYLKKGDKVYIEGRIKTRKWQDDAGNEKYSTEVHCTEFTFLTPKNESNAEPSGKSQASGNTSAKPKSDNFANKNEFYSQDEEEDDLPF

SEQ ID NO: 292 - protein, 136 aa, Unknown
  Staphylococcus phage CNPH82
MTNLTILTGRITKDLELKQAGQTQVTNFSMAVDNPFKKDDTSFFDIVAFGKTAQLLNDYCGKGSKVLIEGNLKQDRFQDKEGNNRSVVRVIANRIEFLDSKGSNQSNNQSPKRGQAPAGNNPFANGTDIENSELPF

SEQ ID NO: 293 - protein, 183 aa, Unknown
  Staphylococcus phage Pvl108
MKITGQAQFTKETNQEKFYNGSAGFQAGEFTVKVKNIEFNDRENRYFTIVFENDEGKQYKHNQFVPPYKYDFQEKQLIELVTRLGIKLNLPSLDFDTNDLIGKFCHLVLKWKFNKDEGKYFTDFSFIKPYKKGDDVVNKPIPKTDKQKAEENNGAQQQTSMSQQSNPFESSGQFGYDDQDLAF

SEQ ID NO: 294 - protein, 160 aa, Unknown
  Prochlorococcus phage P-SSP7
MNHCVLEVEVIQAPTIRYTQDNQTPIAEMEVRFDALRVDTAPGQLKVVGWGNLAQDLQNRVQVGQRLVIEGRLRMNTVPRQDGTKEKRAEFTLARLHSLSGQAGQPASSPERPTSTTTNQTSRPIPIAETPTPKPATTAEPEAASWNSAPLVPDTDDIPF

SEQ ID NO: 295 - protein, 177 aa, Vibrio cholerae
MASRGVNKVILIGNLGQDPEVRYMPSGGAVANITIATSETWRDKATGEQKEKTEWHRVTLYGKLAEVAGEYLRKGSQVYIEGQLQTRKWQDQSGQDRYSTEVVVQGYNGIMQMLGGRTQQGGMPAQGGMNAPAQQGSWGQPQQPAKQHQPMQQSAPQQYSQPQYNEPPMDFDDDIPF

SEQ ID NO: 296 - protein, 159 aa, Bacteroides caccae
MSVNRVILIGNVGQDPRVKYFDTGSAVATFPLATTDRGYTLQNGTQIPERTEWHNIVASNRLAEIVDKYVHKGDKLYLEGKIRTRSYSDQSGAMRYITEIYVDNMEMLTPKGAGQGAGTSAQQGAATPSQQPQQMQQNQQPQQSQAQPVQDNPADDLPF

SEQ ID NO: 297 - protein, 144 aa, Unknown
  Elusimicrobium minutum (strain Pei191)
MASQIRLPEQNLVLLTGRLTRDANTAFTQKGAAVSRFDIAVNRRYMDANGSWQDETTFVPVTLWGPAAERSKDRLKKGVPVHVEGRLVLNEYTDKNGVAHKNLQVNCRRIQILQSAFSESASGSGASFNDTPVDNEAIDDDVPF

SEQ ID NO: 298 - protein, 170 aa, Unknown
  Methylobacterium nodulans (strain LMG 21967 / CNCM I-2342 / ORS 2060)
MAGSVNKVILVGNLGRDPETRRLTSGDPVVNLRLATSESWKDKATGERKEKTEWHSVVIYNENLARVAEQYLRKGSKVYVEGQLQTRKWQDQSGVEKYTTEVVLQRFRGELTILDGRGGGETGAMDEMGGGQISRGGDFGGDRSSGGERRPAPAGGSQKRYDDLDDDIPF

SEQ ID NO: 299 - protein, 187 aa, Unknown
  Yersinia phage YpsP-G,Yersinia phage phiA1122
MAVNKIILLGNVGNYPEVNYTGSGTAVAKFSVATTEKWKDQSGEKKEKTNWHRCVVFGKRAEVVGEYVRKGSQLYIEGSMEYGSYDKDGVTMYTADVHVKDFQFIGGKREDGGNAGGGQSGGWGQPQQTQQQRQPASQPTNTATLKPEGQPKQRQMSQAERMLAQQAAQAQQQSSEPPMDFDDDIPF

SEQ ID NO: 300 - protein, 148 aa, Clostridium botulinum
MNRVVLVGRLTKDPELRFTPGAGKAVATFTLAVNRRFKSQGQPDADFLPIVVWGKQAENTANYVGKGSQVGVSGAIHTRSYEAKDGTRRYVTEIVADEVQFLDSRNAVSRTEPRSTGMNEFDSSNNDNDFNQSYDEEITPIDDGDIPF

SEQ ID NO: 301 - protein, 168 aa, Ureaplasma urealyticum
MNKVILIGNLVRDPEARQIPSGRLVTNFTVAVNDNIPNANANFIRCVAWNNQANFLTTYLKKGDAIAIEGRIVSRSYVDNNGKTNYVTEVYADQVQSLSRRNQNANDHNNDKVNVDTMMGAYASINTDAAFSSNQPQTNFQSTTSNSNKNDDEEDEITSWINLDDDLE

SEQ ID NO: 302 - protein, 175 aa, Mycobacterium marinum
MAGDTTITVVGNLTADPELRFTPSGAAVANFTVASTPRIYDRQSGEWKDGEALFLRCNIWREAAENVAESLTRGARVIVSGRLKQRSFETREGEKRTVVEVEVEEIGPSLRYATAKVNKASRGGGGGGFGGGGGGGGGGGARQAPAQASSPAGGDDPWGSAPASGSFGGDDEPPF

SEQ ID NO: 303 - protein, 160 aa, Oligotropha carboxidovorans
MAGSVNKVILVGNLGADPDVRRTQDGRPIVNLSIATSDTWRDKATGERKEKTEWHRVVIFNEGLCRVAEQYLKKGAKVYIEGALQTRKWQDKDGKDKYSTEVVLQGFNSTLTMLDGRSGGGGGSFAGDDAGSSFGSSGSSQRRSLPPSGGRDDMNDDIPF

SEQ ID NO: 304 - protein, 147 aa, Clostridium botulinum
MNKVVLIGRLTKDPELRFTPGAGTAVTTLTLAVDKYNSKSGQKEADFVPVVVWGKQAESTANYMSKGSQMAISGRIQTRNYEAKDGTKRYVTEVVATEVQFLSKSNASGNVGTNYGNNTEYSSSNNPFDGMNFEEDITPVDDGDMPF

SEQ ID NO: 305 - protein, 159 aa, Unknown
  Collinsella stercoris DSM 13279
MSINRVNISGNLTRDPELRATSSGTQVLSFGVAVNDRRRNPQTGDWEDYPNFVDCTMFGTRAEAVKRYLSKGSKVAIEGKLRYSSWERDGQRRSKLEVIVDEIEFMSRGQQGEGGGYAPAPSYGQQGGYAPAPAPQQAPAPMAAPVPPAVDVYDEDIPF

SEQ ID NO: 306 - protein, 172 aa, Haemophilus parasuis
MAGVNKVIIVGNLGNDPDMRTMPNGDAVATLSVATSESWNDKMTGERREVTEWHRIVFFRRQAEVAGQYLRKGSKVYVEGKLKTRKWQDQNGQDRYTTEIQGDVLQMLDSRSGDQGGGWNQTQTNYNQDGYTDSYAQNNNFNGGNATRPQPAQKPAAQAEPPMDNFDDDIPF

SEQ ID NO: 307 - protein, 182 aa, Agrobacterium rhizogenes
MAGSVNKVILVGNLGADPEIRRTQDGRPIANLNIATSETWRDRNSGERKEKTEWHRVVIFNEGLCKVAEQYLKKGAKVYIEGALQTRKWQDQNGQDKYSTEIVLQGFNSTLTMLDGRGEGGGGGNRGGGGGDFGGGDYGGDDYGQPAPSSGGGRSAGASRGAPASSGGGSNFSRDLDDDIPF

SEQ ID NO: 308 - protein, 168 aa, Unknown
  Salmonella phage SS3e
MASRGVNKVIILGRVGQDPEVRYSPSGTAFANLTVATSEQWRDKQTGEQKEQTEWHRVAVVGKLAEVVGQYVKKGDQVYFEGMLRTRKWQDQTGQDRYTTEINVGINGVMQMLGGTGDSKQQAADRQSQKPQQQPSPTQHNEPPMDFDDDIPFAPVTLPFPRHAIHAI

SEQ ID NO: 309 - protein, 155 aa, Unknown
  [Clostridium] methylpentosum DSM 5476
MLNKVILMGRLTADPEVRQTPNGISVLSFSIAVDRNYSKAEKKTDFINLVAWRQTAEFIGRFFTKGQMIAVEGSIQTRNYEDKTGAKRTAFEVVVDQAHFTGGKSENPVRTTQPSYQQPPKFEEPAQNGESFSVGDFNDFDGFEEIGTDDGDLPF

SEQ ID NO: 310 - protein, 163 aa, Helicobacter pullorum
MFNKVILVGNLTRDVELRYLPSGAALARLNLATNRRYKKQDGTQAEEVCFIDVNLFGRTAEVANQYLKKGSQVLIEGRLVLESWTDNTGAKRTKHSITAESMQMLGQRQSTQEENHDYGAGDYNNYQEYEKPAYTASAAPKAQPVQKEPELPVIDINDDEIPF

SEQ ID NO: 311 - protein, 137 aa, Unknown
  Persephonella marina (strain DSM 14350 / EX-H1)
MLNKVFLIGRLTRDPEIRFLPSGSQVTSFSVAVNRSYRVNNEWKEETYFFDVEAFGYLAERLGKQLNKGTQILIEGQLRQDRWETAGGDKRTKVKIVADKVSILSPKGEKAEKSEEEPELDIENSIEDFSSDEDVPF

SEQ ID NO: 312 - protein, 159 aa, Brevibacillus brevis
MNKVILIGNLTKDPELRYTPNGVAVATFTVAVNRPRTNQAGERETDFINIVAWQKLADLCASYLRKGRQAAIEGRMQTRSYDNKEGKKVYVTEVVAENVQFLGGRGNESGGDNPGYDPGPGMGGGNKPSGQRNNDYDPFGDPFASAGKPINISDDDLPF

SEQ ID NO: 313 - protein, 163 aa, Corynebacterium striatum
MAIDIITITGGLPRDAELRFTKSGKAVTSFTLANSDNKFDQEQNQWVKTRSMYLDVTIWDESTERKQNPVQWARLASELKQGDQVAVKGKLTTRTWETDGGEKRSKMEFLATSFYRMPTTQGAPNGQQAQQNITQGLGAQAAGDPWNGAPQGGFSGADANPPF

SEQ ID NO: 314 - protein, 165 aa, Unknown
  Cryptobacterium curtum (strain ATCC 700683 / DSM 15641 / 12-3)
MSSINRVFITGNLSRDPELRTTASGSAVLSFGVAVVDSVKNQQTGEWEDRPNWVECTLFGSRAQAISGYLHKGSKVAIDGRLHWSQWERNGEKRSKLEVIINDIQFLSPREGAQGAPQQPQYQQPAPTYQQPAPTYQQTAQQPPQQPQTAPQYASASVYDEDIPF

SEQ ID NO: 315 - protein, 170 aa, Bacteriophage A500
MRGGWFCMMNRVVLVGRLTKDPELRYTPSGVAVATFTLAVNRTFTNQQGEREADFINCVVWRKPAENVANYLKKGSLAGVDGRVQTRNYEGQDGKRVYVTEIVAESVQFLEPRNNSGQHQDNNNNSYNQAPANNGFNQNQQQSQSYQTTNNDPFANDGKPIDISDDDLPF

SEQ ID NO: 316 - protein, 172 aa, Unknown
  Lactobacillus prophage Lj928,Lactobacillus johnsonii (strain CNCM I-12250 / La1 / NCC 533)
MINNVVLVGRLTRDPDLRTTGSGISVATFTLAVDRQYTNSQGERGADFINCVIWRKAAENFANFTSKGSLVGIQGRIQTRTYDDKDGKRVYVTEVIVDNFSLLESRRDRENRQTNGGNFAPQGGNAPSTNNFGGSSAPSMNNAPASGESNKPQDPFADSGSTIDISDDDLPF

SEQ ID NO: 317 - protein, 183 aa, Unknown
  Vibrio cholerae (strain MO10),Vibrio cholerae,Providencia alcalifaciens Ban1,Vibrio cholerae Ind4
MITEQNMASRGVNKVILIGNLGQDPEVRYMPSGGAVANITIATSETWRDKATGEQKEKTEWHRVTLYGKLAEVAGEYLRKGSQVYIEGQLQTRKWQDQSGQDRYSTEVVVQGYNGIMQMLGGRAQQGGMPAQGGMNVPAQQGSWGQPQQPAKQHQPMQQSAPQQYSQPQYNEPPMDFDDDIPF

SEQ ID NO: 318 - protein, 138 aa, Fusobacterium mortiferum
MNVVVLVGRLTRDPELKFGQSGKAYSRFSLAVDRPFSKGEADFINCVAFGKTAELIGEYLRKGRKVGVNGRLQMNRFEMNGEKRTSYDVLVEAIEFLESKGSGDSMGGYEPEYSSPTPKSSAKEVEEIPYEDDDEFPF

SEQ ID NO: 319 - protein, 172 aa, Unknown
  Burkholderia phage BcepNY3
MASVNKVILVGNLGADPETRYLPSGDAISNIRLATTDRYKDKASGEFKEVTEWHRVAFFGRLAEIVDEHLRKGASVYIEGRIKTRKWQDQSGQDRYTTEIVADRMQMLGKPSGSRDDGGGERQQRAPQQQQQQRGQRNGYADATGRGQPQRDAQQRPPAGGGFDEMDDDIPF

SEQ ID NO: 320 - protein, 147 aa, Eubacterium rectale
MNKVILMGRLTRDAEIRYAQGDNSLAIARFSLAVDRRYSKNAEEQSTDFINCVAFGKIAEFFERFGRKGTKFVVEGRIQTGSYTNKDGQKVYTTDVVVENAEFAESKSAASGNAGGFAPADRPAPSQAAGDGFMNIPDGIDEELPFN

SEQ ID NO: 321 - protein, 117 aa, Unknown
  Cyanophage PSS2
MATINILGRLGKDPEVKFFDSGNCVAKFTIGDVAGRKDDPTNWFDCEIWGKRAQLLGDTVSKGQRLMVSGDIKTETWTAKDGGNRSKQVVRVSDFQYIESRGEAAGGGQATSEEIPF

SEQ ID NO: 322 - protein, 194 aa, Acinetobacter radioresistens
MRGVNKVILVGTLGRDPETKTFPNGGSLTQFSIATSESWTDKSTGERKEQTEWHRIVLHNRLGEIAQQYLRKGSKVYIEGSLRTRQWTDQNGQERYTTEIRGEQMQMLDSGRQQGDQAGAGFGGDQGYGQPRFNNNQGSQGGYGNGNQQGGGFNNNNNQGGGYGNNNPGGFAPKAPQSAPASQVPADLDDDLPF

SEQ ID NO: 323 - protein, 175 aa, Enterococcus faecalis
MINQVVLVGRLTKDIDLRYTASGSAVGSFTLAVNRNFKNQNGDREADFINCVIWRKPAETMANYARKGTLLGVVGRIQTRNYDNQQGQRVYVTEVICESFQLLEPKSANENSNSIQTSQNDGTSVQNNFEGNYATNQNKGLNQQNNSQQMSFGGDVDPFAGAGNSIDISDDDLPF

SEQ ID NO: 324 - protein, 220 aa, Unknown
  Klebsiella pneumoniae subsp rhinoscleromatis ATCC 13884
MKVISRGQVQQVPAKRQNRGPGNSTGDGFKRQNNGLRRFIMAARGVNKVILVGYLGQDPEVRYMPNGGAVANLTLATSETWRDKQTGEMRENTEWHRVVMFGKLAEVAGEYLRKGAQVYIEGQLRTRNWQDDAGVTRYVTEVLVGQNGTMQMLGGRRESGVPESAAQPQNPATPAQPAQAAAKSPKAKGGKKGRQDAAPSQQPPQPLPDDFPPMDDDAPF

SEQ ID NO: 325 - protein, 171 aa, Haemophilus influenzae
MRFFMAGINKVIIVGHLGNDPEIRTMPNGDAVANISVATSESWNDRNTGERREVTEWHRIVFYRRQAEICGEYLRKGSQVYVEGRLKTRKWQDQNGQDRYTTEIQGDVMQMLGGRNQNAGYGNDMGGAPQPSYQARQTNNGGSYQSSRPAPQQSAPQAEPPMDGFDDDIPF

SEQ ID NO: 326 - protein, 137 aa, Unknown
  Leptotrichia goodfellowii F0264
MNQVLLIGRLTKDPELKYSQSGKAFCRFSIAVTKEFNRNETDFFDCVAWNKTAEIIAEYMRKGKKIAIQGRLETGSYEKEGRNIKTYSIIVDKFEFVDSAGGQGQQQSSSYSQGTQPKETFADNDNDEIMDDDDFPF

SEQ ID NO: 327 - protein, 172 aa, Unknown
  Lactobacillus phage phijl1
MINNVVLVGRLTRDPDLRTTGSGISVATFTLAVDRQYTNSQGERGADFINCVIWRKAAENFANFTSKGSLVGIQGRIQTRTYDDKDGKRVYVTEVIVDNFSLLESRRDRENRQANGGNFAPQGGNAPSTNNFGGSSAPSMNNAPASGESNKPQDPFADSGSTIDISDDDLPF

SEQ ID NO: 328 - protein, 142 aa, Fusobacterium ulcerans
MNLVVLTGRLTRDPELKFGQSGKAYSRFSLAVDRPFQKGEADFINCVAFGKTAELIGEYLRKGRKVGVNGRLQMNRYEANGEKRTSYDVLVENIEFLEAKGSGDSAGYEPHDYAAAAPASAPKPSVKEAEDVPFDDDDEFPF

SEQ ID NO: 329 - protein, 173 aa, Pediococcus acidilactici
MINRAVLVGRLTRDPELRYTSSGAAVVSFTVAVNRQFTNSQGEREADFINCVMWRKAAENFANFTRKGSLVGIDGRIQTRSYENQQGQRVYVTEVVADNFSLLESRSASERRQENEGFNNGQSAPSQSSAGNPFDSGQANNNGAASQPNNSNPNDPFANGGQSIDISDDDLPF

SEQ ID NO: 330 - protein, 187 aa, Unknown
  Desulfovibrio sp FW1012B
MAGSINKVILVGRLGQDPKLTYLASGSPVAEFSVATDESYKDREGNKQEKTEWHRVKVFGRSAEFCNNYLTKGRLVYIEGTLRTRSWEDQQGQKRYTTEVVVTGPGHTVQGLDSRGQASEAPMGEEGGFQPRRAPQQGGGGGGQGGAPRGNYGGQGQSGGSRQQPYPDEDQGPAFPSEASGMDDVPF

SEQ ID NO: 331 - protein, 150 aa, Unknown
  Hungatella hathewayi DSM 13479
MNRVILMGRLTRDPEVRYSQGERAMAIARYTLAVDRRGRRNQDGNEQTADFINCVAFDRAGEFAEKYFRQGMRVLISGRIQTGSYTNKDGIKVYTTDIIVDDQEFADSKGAASGEGGGYQPTSRPAPSSAIGDGFMNIPDGVEDEGLPFN

SEQ ID NO: 332 - protein, 171 aa, Streptococcus gallolyticus
MINNVVLVGRMTRDAELRYTPSNQAVATFTLAVNRNFKNQNGEREADFINCVIWRQQAENLSNWAKKGTLIGVTGRIQTRNYENQQGQRVYVTEIVADNFQILESRATREGQSGGSYNGGFNNNNSSFGGSSNDGGFSSQPSQSQTPNFGRDESPFGNSNPMDISDDDLPF

SEQ ID NO: 333 - protein, 140 aa, Hydrogenobacter thermophilus
MLNKVLIIGRLTKDPSVRYLPSGNQITEFSIAYNRRYKVGDDWKEESHFFDVKAYGKLAESLSTRISKGYTVVVEGRLTQDRWTDKEGKAQSKVRIVADAVRIINKPKLDEAPEEEVIPDTYEQEAEEKLWNSQDDEIPF

SEQ ID NO: 334 - protein, 152 aa, Unknown
  Ruminococcus sp SR1/5
MNKVILMGRLTRDPEVRYSAGENALAIARYTLAVDRRFRRDGEASADFISCVSFGRTAEFAEKYFRQGLKIAVTGRIQTGSYTNREGQKVYTTEVVVEDQEFAESKASSDSYAAAHPRTEAAPATSMPSPSAASADGFMNIPDGIDEELPFN

SEQ ID NO: 335 - protein, 122 aa, Serratia odorifera
MVLFGKLAEVAGEYLRKGSQVYIEGALQTRKWTDQAGVEKYTTEVVVNVGGTMQMLGGRQGGGAPAGGGQAAGGQGNWGQPQQPQGGNQFSGGQQSRPAQNSNAPAASSNEPPMDFDDDIPF

SEQ ID NO: 336 - protein, 195 aa, Unknown
  Acinetobacter sp SH024
MRGVNKVILVGTLGRDPETKTFPNGGSLTQFSIATSEAWTDKNTGERKEQTEWHRIVLHNRLGEIAQQFLRKGSKVYIEGSLRTRQWTDQNGQERYTTEIRGDQMQMLDARQQGEQGFAGGNDFNQPRFNAPQQGGNGYQNNNNQGGGYGQNSGGYGSQGGFGNGGSNPQAGGFAPKAPQQPASAPADLDDDLPF

SEQ ID NO: 337 - protein, 179 aa, Unknown
  Burkholderia phage BcepGomr
MASVNKVILVGNLGADPEVRYLPSGDAVANIRLATTDRYKDKASGEMKEATEWHRVSFFGRLAEIVSEYLKKGSSVYLEGRIRTRKWQAQDGTDRYSTEIVAEQMQMLGGRGGSMGGGGDEGGYSRGEPSERSGGGGGGRAASGGGSRGGSGGGAGGGASRPSAPAGGGFDEMDDDIPF

SEQ ID NO: 338 - protein, 169 aa, Unknown
  Burkholderia phage BcepC6B
MASVNKVILVGNLGADPEVRYLPSGDAVANIRVATTDRYKDKESGELKEVTEWHRVSFFGRLAEIVSEYLKKGSSVYIEGRLRTRKWQQDGVDRYSTEIVADQMQMLGGNGKGRTGEGEGDSESGAAPETAAGAPAEGSSSKTRSRRAAPQRRASATAGNEMDDDEPFA

SEQ ID NO: 339 - protein, 176 aa, Unknown
  Komagataeibacter oboediens
MAGSVNKVILVGNLGKDPEIRNSQNGAKIVSLTLATSETWNDRASGERRERTEWHRVVIFNERIGDVAERFLRKGRKVYLEGTLQTRKWTDQSGMERYTTEVVIDRFRGELVLLDSNRGGEGGEGGGYGGGPGGGGGYGGGAPRPAQAPRSTPPAGGGGGWDAPSGGSDLDDEIPF

SEQ ID NO: 340 - protein, 171 aa, Unknown
  Peptoniphilus duerdenii ATCC BAA-1640
MNVVTLIGRLTRDPELRYSPSGMANVRITVAVDRGYNQQKRQEAESQNQPTADFISCVAFGKTAELIANYFNKGNRIGLEGRIQTGSYDKPDGTRVYTTDVVVNRVHFIESRSESQTYQRRPQEGAGGFSAPSQNPGGFNKPPVNSSYDQFSTSEDEGEAFFPVDNEDIPF

SEQ ID NO: 341 - protein, 176 aa, Paenibacillus curdlanolyticus
MLNRVILIGRLTRDPELRYTPAGVAVTQFTLAVDRPFTSGGGEREADFIPVVTWRQLAETCANYLRKGRLAAVEGRIQVRNYENNEGKRVYVTEVIADNVRFLESNREGGAPREEGSYGGGNSGGGFGGGSNAGGGSYGGNSGGGSRSGQNQRNDNRDPFSDDGRPIDISEDDLPF

SEQ ID NO: 342 - protein, 171 aa, Unknown
  Ahrensia sp R2A130
MAGSVNKVILVGNLGRDPEIRRTQDGKAIANFSIATSETWRDRNSGERREKTEWHRIACFNEGLNKVIEQYVKKGSKVYIEGQLQTRKWTDNAGVEKYTTEIVLQNFTGVLTMLDSRNSGGDGGGDSFGGGGGGGQIGGSGGGNYGGGGSGGGNQGGGFPSGGDMDDDIPF

SEQ ID NO: 343 - protein, 175 aa, Unknown
  Parasutterella excrementihominis CAG:233
MASVNKVIILGNLGRDPETRFSGNNLQITSMSVATTSYRRSAETQERVEETEWHRVVLFGRQAEIAQQYLKKGSRVYLEGRLRTRKWEKDGQTHYSTEILADTLQLIDRKSDVVGGGQSYAPQSSGDGFESPAAPRRSEFTSGAPAARPAAPAQPAAPVPSAAPTDDFEADEIPF

SEQ ID NO: 344 - protein, 127 aa, Unknown
  Mycobacterium phage Troll4,Mycobacterium phage Gumball,Mycobacterium phage Nova, Mycobacterium phage SirHarley, Mycobacterium phage Adjutor, Mycobacterium phage Butterscotch, Mycobacterium phage PLot, Mycobacterium phage PBI1
MASVDIQQVGNLTADPELRFLPSGVAVAQFSVASTPRVKKGDEWVDGETVFLRCTVWRELAEGAAETLRKGDQVVVLGKLKQRSFETKEGEKRTVFEVDGEFVGKSVRARKSRDGGYSAAATEEPPF

SEQ ID NO: 345 - protein, 163 aa, Paenibacillus polymyxa
MLNRVILIGRLTKDPELRYTPSGVAVTQFTLAVDRPFTSQGGEREADFLPIVTWRQLAETCANYLRKGRLTAVEGRVQVRNYENNEGKRVYVTEIVADNVRFLESNRDGGNGGGNSGGAAREESPFGGGNSNSGRGNNNSRNNQDPFSDDGKPIDISDDDLPF

SEQ ID NO: 346 - protein, 174 aa, Neisseria lactamica
MSLNKVILIGRLGRDPEVRYMPNGEAVCNFSVATSETWNDRNGQRVERTEWHNITMYRKLAEIAGQYLKKGGLVYLEGRIQSRKYQGKDGIERTAYDIVANEMKMLGGRNENSGGAPYEEGYGQSQEAYQRPAQQNRQPAPDAPSHPQEAPAAPRRQPVPAAAPVEDIDDDIPF

SEQ ID NO: 347 - protein, 179 aa, Hafnia alvei
MASRGVNKVILVGNLGQDPEVRYMPNGGAVANITLATSETWRDKQTGEQKEKTEWHRVVLFGKLAEVAGEYLRKGSQVYIEGALQTRKWTDQAGVEKYTTEIVVNVGGTMQMLGGRQGGGAPMGGGQAQGQQGGWGQPQQPQGNQFSGGSQPAARPQSAPAAQPQSNEPPMDFDDDIPF

SEQ ID NO: 348 - protein, 139 aa, Unknown
  Thermaerobacter marianensis (strain ATCC 700841 / DSM 12885 / JCM10246 / 7p75a)
MLNVVVLIGRLVRDPELRYTPSGVAVGGFTLAVDRPFTNQQGEREADFIDIVVWRKLAETCANHLSKGRLVAVRGRLQVRSYETQDGQRRRVAEVVADDVRFLDRGPGADRGAAPGSPAGDELADFGDVTGLPDDDIPF

SEQ ID NO: 349 - protein, 169 aa, Unknown
  Bacillus sp 2_A_57_CT2
MMNRVVLVGRLTKDPDLRYTPNGVPVASFTLAVNRTFTNQQGEREADFINCVVWRKPAENVANFLKKGSLAGVDGRIQSRSYEGQDGKRVYVTEVQAESVQFLEPKNSSGGQGGNPNYGGPRDQDFPFGNNSNQNQRQDNRNQGGYTRVDQDPFANDGQIDISDDDLPF

SEQ ID NO: 350 - protein, 169 aa, Unknown
  Bartonella schoenbuchensis (strain DSM 13525 / NCTC 13165 / R1)
MAGSLNKVILIGNLGADPEIRRLNSGDQVANLRIATSESWRDRNTNERKERTEWHSIVIFNENLVKIAEQYLKKGNKIYIEGQLQTRKWQDQNGNDRYTTEIVLQKYRGELQMLEGRGAMDGGERMQDTSPLGGGDFGDSSFDRKEDFSQNSNYLEGNFSHQLDDDVPF

SEQ ID NO: 351 - protein, 138 aa, Unknown
  Streptococcus phage V22,Streptococcus pneumoniae
MINNVTLVGRLVAPPDLRKTPNNVSSLQGTLAVNRNFKNENGEREADFINFQAWRGTADVIAQYCSKGSLIGLTGRLQVRSYEKDGQRRYVTEVIAESVALLESRNSQHGQGNSFQNGNSSPFTDPNPFDLPNDGLPF

SEQ ID NO: 352 - protein, 176 aa, Unknown
  Anaerococcus hydrogenalis ACS-025-V-Sch4
MNKVFLIGRLTKDPDLRYTQQGQAVVSFSLAVDRGLSKQKRQEMESMNRPTADFPRITVWGVQAENVSRYLKKGNQCAIDGRIQTGSYQDKDGKMVYTTDVVADRVEFLESRSEGQYQNNNNPMNQDNGFGDMNQDRSYNNSNNFQQNNNQNMNSNNDDFFDDDFTEIEDDGRIPF

SEQ ID NO: 353 - protein, 144 aa, Unknown
  Capnocytophaga sp oral taxon 338 str F0234
MNIVGRLTENAQVQTLSNGKQVVNFSVAVNDNYRNKAGENVQQTSFFDCAYWLSTGVAPYLTKGTLVELEGRVSARAWLNREGEPQAGLNFHTSKIKFHFSKKAEVTPNTSASEANNANAITPLPKPQVTTGQVAEEDEDDLPF

SEQ ID NO: 354 - protein, 178 aa, Unknown
  Enterobacteria phage HK629,Salmonella phage HK620 (Bacteriophage HK620)
MASKGVNKVILVGNLGQDPEVRYMPNGGAVANLSLATSDTWTDKQTGDKKERTEWHRVVLYGKLAEIASEYLRKGSQVYIEGALRTRKWTDQSGVEKYTTEVVVSQSGTMQMLGGRSNAGNGQQQGGWGQPQQPAAPSHSGTPPQQHPASEPPMDFDDDIPFAPFGHSVSRHALYALS

SEQ ID NO: 355 - protein, 180 aa, Unknown
  Methyloversatilis universalis (strain ATCC BAA-1314 / JCM 13912 /FAM5)
MASVNKVIIVGNLGRDPETRYAPNGDAICNITVATTDSWKDKQTGERKEQTEWHRVSFYGRLAEIAGQYLRKGSPVYVEGSLRTRKWQDKEGQDRYTTEIRAEQMQMLGSRQGAGGEGGGSGGGYGGGGGGYGGGDDFDQAPPQRQSAPRQAPSRPQSAPSAPPASSGGGFGGMDDDIPF

SEQ ID NO: 356 - protein, 156 aa, Unknown
  Streptococcus infantis SK970
MINNVVLVGRMVRDAELRYTPSNVAVATFTLAVNRTFKSQNGEREADFINVVMWRQQAENLANWAKKGSLIGVTGRIQTRSYDNQQGQRVYVTEVVAENFQMLESRSVREGQTGGAHSAPSSNYSAPTQSVPDFSRDENPFGTTNPLDISDDDLPF

SEQ ID NO: 357 - protein, 177 aa, Unknown
  Listonella phage phiHSIC
MASRGVNKVILVGNLGNDPEIRYMPGGAAVANITIATSDSWRDKATGEQREKTEWHRVALFGKLAEVAGEYLRKGSQVYIEGQLQTRKWQDQSGQDRYTTEVVVQGFNGVMQMLGGRAQGGAPAQGGMPQQQQQGGGWGQPQQPAMQKQPQQQQSAPQQAQPQYNEPPMDFDDDIPF

SEQ ID NO: 358 - protein, 181 aa, Unknown
  Lactobacillus ruminis SPM0211
MINRVVLVGRLTRDPDLRYTNSGTSVASFTVAVDRNFTNQQGNREADFINCVVWGKSAENFANFTHKGSLVGIEGRIQTRSYENQQGNRVYVTEVVTENFSLLESKAESDRYRAQHGGSASSAPRQQSQSSFVGNPYGAPANNQGSYQQDNGYGNVNNDAMQDPFAGNGSKTDVSEDDLPF

SEQ ID NO: 359 - protein, 161 aa, Unknown
  Paenibacillus mucilaginosus 3016
MLNRVILIGRLTRDPELRYTPAGVAVTQFTLAVDRPFSSNQGQREADFIPVVTWRQLAETCANYLRKGRLAAVEGRIQVRNYDNNEGRRVYVTEVIADNVRFLESPNSGNREDGSGMGGSSGGGSSSGGGNRGSYGGGREQQDPFQDDGRPIDISDDDLPF

SEQ ID NO: 360 - protein, 164 aa, Unknown
  Simkania negevensis (strain ATCC VR-1471 / Z)
MNQLTIMGHLGADPEVRFTSSGQKVTTLRVAENQKRGGKDETLWWRITIWGDQFDKLVSYLKKGSAIIVTGEMSKPEIYNDRDGKPQISLNMTAYHIAFSPFGRTEKQPQEEPAMAGQSSGMSGFGGDQGQQHHYHKGGYDQSHMSQGQGPTSYNEPSDDEIPF

SEQ ID NO: 361 - protein, 170 aa, Unknown
  Sporosarcina newyorkensis 2681
MINRVVLVGRLTKDPELKYTQSGIAVTRFTLAVNRAFSNQQGEREADFINCVAWRKQAENIANYLRKGSLAGVDGRIQTGSFEGQDGKRVYTTEVVADSTQFLEPRSANQERPQTPSYGGAPSYNNAPSQDQGYNQQSYQPNQQNMTRVDNDPFQPGGGPIEVTDDDLPF

SEQ ID NO: 362 - protein, 187 aa, Lactobacillus reuteri
MLNRAVLTGRLTRDPELRYTTSGTAVVSFTLAVDRQFRNQNGDRDADFINCVIWRKSAENFSNFTHKGSLVGIEGRIQTRNYENQQGNRVYVTEVVVDNFALLEPRQNGGMNQSGMQQPFNNNQQSFGAQAPQYGSQPQPGNNAPQSNPSPSMDNGFDPNQNAGNQFPGSSDDGGQSIDLADDELPF

SEQ ID NO: 363 - protein, 172 aa, Unknown
  Bacillus subtilis subsp spizizenii (strain TU-B-10),Jeotgalibacillus marinus
MLNRVVLVGRLTKDPELRYTPNGAAVATFTLAVNRTFTNQSGEREADFINCVTWRRQAENVANFLKKGSLAGVDGRLQTRNYENQQGQRVFVTEVQAESVQFLEPKNGGGSGSGGYNEGNSGGGQYFGGGQNDNPFGGNQNNQKRNQGNSFNDDPFANDGKPIDISDDDLPF

SEQ ID NO: 364 - protein, 205 aa, Unknown
  Thiorhodovibrio sp 970
MASRGVNKVILIGNLGNDPEIRYFPNGDAVTNLSIATSESWKDRNTGEPQERTEWHRIVIRGKLAEIAKQYLRKGSKVFIEGKLRTRKWQGQDGQDRYTTEVIVDMTGSMQMLDSRPSGGDYGADNSGGSWTSDPAPGIGTAAATTYAQAPYPDQQSPQQQAPAPQNSGQYPSQYPNQQPAQSPAPPPDQSGPGLDEPFDDDIPF

SEQ ID NO: 365 - protein, 158 aa, Unknown
  Paenibacillus lactis 154
MLNRVILIGRLTRDPELRYTPSGVAVTQFTLAVDRPFTGQGGEREADFIPVVTWRQLAETCANYLRKGRLTAVEGRIQVRNYENNEGKRVYVTEVIADNVRFLESNREGGGGGNREESSFGGGSGSGNRGGNNFSRNNQDPFSDEGKPIDISDDDLPF

SEQ ID NO: 366 - protein, 131 aa, Unknown
  Streptococcus phage M102
MINNVVLVGRTTKEIELKYTSNNLAYANFTLAVNRNFKNQNGEREADFINIVIWRQQAENLANWAKKGTLLGITGRIQTRNYENQQGQRVYVTEVVADNFQILERREVQANTQKPAQQEAFSDVDDIDLPF

SEQ ID NO: 367 - protein, 174 aa, Unknown
  Commensalibacter intestini A911
MAGSVNKVILVGNLGKDPDVRTTQMGTKVVNLTLATSDTWNDRQTGERKENTEWHRVVIFNERLADVAEKYLRKGRKVFIEGQLKTRKWTDQQGMERYTTEVVVDRFRGELVLLDSNRSGGDDMGYGDDYGASAPMAPASRPAMSAPSAPSKSAGGGWDSSMPGHNDLDDEIPF

SEQ ID NO: 368 - protein, 137 aa, Unknown
  Desulfitobacterium metallireducens DSM 15288
MLNRVVLIGRLTKDPELRYTPSGVAVATFTLAVDRNFKNSNGERDTDFIPCVVYRQLAELCANFLSKGRLASVDGRLQVRSFEGQDGQRRWVTEVIAENVQFLSPKENGNSGNGTSGNASNVGTYGHEVSLDDDIPF

SEQ ID NO: 369 - protein, 163 aa, Unknown
  Paenibacillus terrae (strain HPL-003)
MLNRVILIGRLTKDPELRYTPSGVAVTQFTLAVDRPFTSQGGEREADFLPIVTWRQLAETCANYLRKGRLTAVEGRVQVRNYENNEGKRVYVTEIVADNVRFLESNRDGGNGGGNSGGAAREESPFGGGNSNSGRGNNNSRNNHDPFSDDGKPIDISDDDLPF

SEQ ID NO: 370 - protein, 163 aa, Unknown
  Bradyrhizobium sp STM 3843
MAGSVNKVILVGNLGKDPEIRRTQDGRPIANLSIATSETWRDKATGERKEKTEWHRVVIFNEGLCKVAEQYLKKGAKVYIEGALQTRKWTDQSGVEKYSTEVVLQGFNSTLTMLDGRGGGGGSFADEPGGDFGSSGPSMAPPRRAVASAGGGRNSDMDDDIPF

SEQ ID NO: 371 - protein, 159 aa, Unknown
  Frateuria aurantia (strain ATCC 33424 / DSM 6220 / NBRC 3245 / NCIMB13370) (Acetobacter aurantius)
MARGINKVILVGNLGGDPELRYTGGGTAVCQLRVATAETWNDKQSGQRQERTEWHRVVLFGKLGEIAQEYLRKGRQVYIEGSLRTKEYTDKEGIKRFTTEVIATDMQMLSGDGGSSGNRQQPGNSRGRGQQANQRGHAQQHEPPPDQGAPPFDDDDIPF

SEQ ID NO: 372 - protein, 173 aa, Unknown
  Bacillus sp 1NLA3E
MMNRVVLVGRLTKDPDLRYTPNGVAVATFTLAVNRSFSNQQGEREADFINCVVWRRPAENVANFLKKGSLAGVDGHIQTRHYEGQDGKRVYVTEVVAESVQFLEPKSSASGDRGGSGTYNEPREQQGSPFGNSNNNQNQNQRQNNNNKGYTRVDEDPFAGDGQIDISDDDLPF

SEQ ID NO: 373 - protein, 164 aa, Unknown
  Paenibacillus dendritiformis C454
MLNRVILIGRLTRDPELRYTPSGVAVTQFTLAVDRPFSNQSGEREADFIPVVTWRQLAETCANYLRKGRLTAVEGRIQVRNYDNNEGKRVYVTEVIADNVRFLESNRDSGGSRDDMGGGYGGGQPNNNSRPYGGGGSNQSRGPAADPFSDDGRPIDISDDDLPF

SEQ ID NO: 374 - protein, 178 aa, Unknown
  gamma proteobacterium BDW918
MARGINKVILVGNLGQDPETRYMPSGGAVTNVTIATSETWKDKQSGQPQERTEWHRVVFFNRLAEIAGEYLKKGSKVYVEGSLRTRKWQNKEGVDQYTTEIVAAEMQMLDGRGGAGGGASGGASNYDDGGYGQQQAPQAQAAAPAPRRAPPPQQNRAPAAPAQNPPAGFDDFDDDIPF

SEQ ID NO: 375 - protein, 179 aa, Haemophilus paraphrohaemolyticus
MAGVNKVIIVGNLGNDPEMRTMPNGEAVANISVATSESWTDKNTGERREATEWHRIVFYRRQAEVAGQYLRKGSQVYVEGRLKTRKWQDQNGQDRYTTEIQGDVLQMLGSRNQGGEMGGQGGWSQSNNQGGNWNQAPASNNYNQGNSYNNNYSQTASKPVAKPAQAEPPMDNFDDDIPF

SEQ ID NO: 376 - protein, 175 aa, Unknown
  Xanthomonas phage OP2
MASRGVNKVILVGNLGNDPEIRYMPNGGAVANITVATSESWNDKQTGEKKEVTEWHRVVLFGKVAEIAGEYLKKGSQVYIEGQLKTRKWEKDGVERYTTEIVVNVGGTMQMIGKAPEGGSGGGNRSASNTGWGQPQQPQHSGTPNNKPQNRPSANHQGAAQNGEPPMNFDDDIPF

SEQ ID NO: 377 - protein, 148 aa, Unknown
  Nitrolancea hollandica Lb
MARRDLNKIQIIGNLGRDPEMRYTPGGTPVTEFSVAVNRPPRRGQDGQATEETDWFRVVCWDKLAEITDQYLKKGSRVYIEGRLQIRKYTGNDGVDRTSVEIIARDMLMLSGREEGGYAGREEGGTRREPASSRSGDSGEEDFDDLPF

SEQ ID NO: 378 - protein, 177 aa, Unknown
  Herbaspirillum sp YR522
MASVNKVIIVGNLGRDPETRYMPNGEAVTNIAVATTESWKDKNSGEKKELTEWHRITFYRKLAEIAGQYLKKGSQIYVEGRLQTRKWTDKDGGERYTTEIIADTMQMLGSRQGGGGGGGSMDDGGSYGGGGGGYGGGAPRQAGGGAGGGGGASAPRQQPARQPASNNFQDMDDDIPF

SEQ ID NO: 379 - protein, 182 aa, Unknown
  Rhizobium sp CF080
MAGSVNKVILVGNVGADPEIRRTQDGRPIANLRIATSETWRDRNNGERREKTEWHTVVVFNEGLCKVVEQYVKKGAKLYIEGALQTRKWQDQTGNDRYSTEIVLQGFNSTLTMLDGRGEGGGDRGGAGGNRVGNDFGGNDFGGGDDYERRPAAGGASRGGQSSGGQPAGGNFSRDLDDDIPF

SEQ ID NO: 380 - protein, 163 aa, Paenibacillus alvei
MLNRVILIGRLTRDPELRYTSSGVAVTQFTLAVDRPFSSQGGEREADFIPVVTWRQLAETCANYLRKGRLTAVEGRIQVRNYDNNEGKRVYVTEIIADNVRFLESNRDNGGTRDDMGSNYGAPAPQYNAPARGGNSNSRGQAAADPFSDDGRPIDISDDDLPF

SEQ ID NO: 381 - protein, 141 aa, Unknown
  Lactobacillus phage KC5a,Lactobacillus phage phi jlb1
MINRVVLAGRPTRNLELKSIKSGNSVCSFTLAVDRNFKSKSGEREADFINCVAWGKTAEVMSQYVKKGSAIGVDGRIQTRSYDNRDGQRVYVTEVVVENFSFLSDPPKNSQVSKNNQSLNQSNDPFDSNGQVDIADDDLPF

SEQ ID NO: 382 - protein, 170 aa, Unknown
  Gordonia soli NBRC 108243
MAGDTVITVIGNLTADPELRFTPSGAAVANFTVASTPRTFDRQTNEWKDGEALFLRCNIWRDAAENVTESLTKGSRVIVQGRLKQRSFETREGEKRTVVELEVDEIGPSLRYATAKVNKASRGGGGGGGFGSSGGGSRGGGSNQQVADDPWGSAPASSGSFGGGDDEPPF

SEQ ID NO: 383 - protein, 148 aa, Streptomyces rimosus
MSFGETPVTIIGNLTADPELKYTTGGQALARFTVASTPRTFDREANQWKDGTSTFFRCATWRALAEHVAESLTKGSRVVLSGRIRQHNWQTEQGENRSMLAVEVDEIGASLRFTTVTIEGKRTNGTAPADDPWNTAGNPAKTDEEPPF

SEQ ID NO: 384 - protein, 149 aa, Clostridium sordellii
MNHVVLVGRLTKDPELRYIPGTGTAVATFTIAIDRDYAKKDGSRETDFIPVEVMGKSAEFCANYISKGRLVALQGSIRVDNYQNQSGERRTFTKVSARNIQALDSNKNRSDSPYPSQNQSFEPSFEPSFEPTGLDPQGFQAIDDDDIPF

SEQ ID NO: 385 - protein, 152 aa, Unknown
  Pseudomonas aeruginosa,Pseudomonas aeruginosa DHS01,Pseudomonas phage LKA5,Pseudomonas phage F116
MATPVFWEGNIGSAPEHRSFPNGNNPPRQLLRLNVMFDNSIPDGQGGYKDRGGFWCSVEWWHQDAQRFAELFAKGMRVKVEGRAIMDRWPDKESGEEVQALKVEASRISILPHRLAEVTLLPSTNGQATQHQQTRQVSQQDYDSAFDDDIPM

SEQ ID NO: 386 - protein, 180 aa, Unknown
  Lactobacillus rossiae DSM 15814
MINRAVLTGRLTRDPEVRYTQSGAAVGSFTLAVDRQFTNQQGQREADFINCVIWRKSAENFANFTHKGSLVGIEGRIQTRNYENQQGQRVYVTEVVVENFALLESRSQSDQRTSGNTNDNGGYNNNAPQSGSANPFGGTGNNGGNNAGNTAPSSQSSQTPADPFAGNGESIDISDDDLPF

SEQ ID NO: 387 - protein, 164 aa, Unknown
  Nocardia terpenica
MFGAITPTVIGNLTADPELFFSKKGEAGVHFTVACNDRYYDKDAERYKDLPAVFMRCTAWGALAEHISDSLSRGMTVIAYGRLKQSSYTVKDTGEKRTVMEMTIDVLGPSLQYATAVVTKASRAATVIGEPIDDPWGDAAEQTPVSVGAGEQSSPEGDDDKPPF

SEQ ID NO: 388 - protein, 148 aa, Spiroplasma kunkelii
MNQFTAIGRTTKDIEIKKTNNGKEYAIFQLAVARPHSNKKETDFIPCQVWNKQASVLQQYCQKGSQIAIKGILQSFKDKDNKIHWMVRVYSYEFLQTKNNLNNDTYNDIQSITPNITDQTQLIPRNIRLEEVETKELFENQDDTILWD

SEQ ID NO: 389 - protein, 154 aa, Enterococcus faecalis
MINNLTLVGRLTKDVDLRYTKSGTAVGQFILAVNRNFTNQNGDREADFINCVIWRKAAESLANYARKGTLIGLTGRIQTRNYENQQGQRVYVTEVVIENFQLLESKEVNEQRRGQSTGAGQATFDKQPTDKPDPLDPFEQGNSPIEISDDDLPF

SEQ ID NO: 390 - protein, 148 aa, Unknown
  Mycobacterium phage Hamulus, M. phage Dante, M. phage Ardmore, M. phage Llij, M. phage Drago, M. phage Phatniss, M. phage Spartacus, M. phage Boomer, M. phage SiSi, M. phage PMC, M. phage Ovechkin, M. phage Ramsey, M. phage Fruitloop, M. phage SG4
MALTLPVVTIEGTLTADPTLNFTQGGTAVSNITIACNTRRKNPQTDQWEDGDTTFMRGTIWKQLAENVSDSLRKGDRVLAHGVLKQKDYEKDGVKRTAYELDIEGIGPSLRFATASVTKSSGGSGGGARQQPKEDPWGGSSDDWGGDF

SEQ ID NO: 391 - protein, 173 aa, Unknown
  Dialister sp CAG:486
MNSVQVMGNLARDPVVRATKTGRAMASFTVAVNRSFTTPQGEQREITDWINVVAWGNLAEAVGNQLKKGSRVFVEGRFTTRSYDTPDGQRRWVSEVTANFVALPIGGFSHSQQQPSGNAFGGNNGYTGNNGYGGNNGGFNNGASPFGQSQPQGQPKSSFGQFGQASKDEDIPF

SEQ ID NO: 392 - protein, 158 aa, Unknown
  Faecalibacterium sp CAG:82
MLNVVAIMGRLVADPELRTTQSGINVVSFRIACDRNFARQGEQRQADFIDIVAWRQQAEFVSKYFQKGSLIAIEGSLQTRQYQDKNGNNRTAVEVVANNISFAGPKSNNQGGGSYQNAAPSYQNQAPARPAAVEAAPSYSSGSADDFAVIDDSDDLPF

SEQ ID NO: 393 - protein, 142 aa, Unknown
  Clostridium sp CAG:470
MNKVILMGRLTRDPEVRYTQTNNTLVASFSLAVNRRFARQGEERQADFINIVAWSKLGEFCSKYFKKGQQVGIIGRIQTRTWDDDQGVKHYVTEVVAEEAYFADSKREGDMGAGTFENTFGNTMPGSMGSDFETSSTDDLPF

SEQ ID NO: 394 - protein, 153 aa, Unknown
  Prevotella sp CAG:873
MNKVMLIGNVGKDPDVKYYDADQAVAQFSLATTERGYQLPNGTRVPDRTDWHNIVMWGNLAKIVERYVHKGDRLYVEGKMRYRYYDDKKGQRRFIAEVYADNMELLTPRSAANTAADSTSQNTNAAANNANQNAASSSNASIASTEDDDQLPF

SEQ ID NO: 395 - protein, 181 aa, Unknown
  Pseudomonas phage vB_Pae-Kakheti25
MARGVNKVILVGTCGQDPEVRYLPNGNAVTNLSLATSEQWTDKQSGQKVERTEWHRVSLFGKVAEIAGEYLRKGSQVYIEGKLQTREWEKDGIKRYTTEIIVDMQGTMQLLGGRPQNQQGGGDQYNQGGGNNYNQGGQQQQYNQAPQRQQAPRPQQQRPAPQQPAPQPAADFDSFDDDIPF

SEQ ID NO: 396 - protein, 171 aa, Haemophilus paragallinarum
MAGVNKVIIVGNLGNDPEIRTMPNGEAVANISVATSESWMDKNTGERREITEWHRIVFYRRQAEVAGEYLRKGSKVYVEGRLRTRKWQDQNGQDRYTTEIQGDVLQMLDSRADRGQGGYSAQGGYAQQGSNQYAQPAQPSYQAPQQQAAARPSSPPTPMVDDNFDDDNIPF

SEQ ID NO: 397 - protein, 150 aa, Unknown
  Streptomyces sp HPH0547
MAMGDTPVTVVGNLVADPELKYTQSGTALARFTVASTPRSYDRESGQYKDGTAMFMRCSAWRGLAENIASSLAKGNRVVVTGRLRQHNWQTPEGENRSMLALEVDEIGPSLRFATAQPAKADNETKKTAPPADDPWNTTPAPAGGDEPPF

SEQ ID NO: 398 - protein, 189 aa, Unknown
  Dermabacter sp HFH0086
MANDTVITVVGNLTADPELRFTNSGIPVASFTVASTPRTFDRQSGEWKDGEALFLRCSIWRDAAENVAESLTKGTRVIVQGRLQQRSYTDREGNNRTSIELQVDEIGPSLRYATAKPTRTQRGGGGNFGGGFNGGNSGGGNYGGGQGGYSNQGGYGGNRGGAQGGPQGGQNPADVDPWSNGGAEEPPPF

SEQ ID NO: 399 - protein, 178 aa, Treponema socranskii
MTDINHVLVIGRLTRDFGADPRTFFYTTGGTACAKVSIAVNRSVKQSDGQWTDEVSFFDVTIWGKTAENLKPYLVKGKQIAVDGYLKQDRWQKDGQNFSKVNIVANSVQLLGGGTSAPESAPAPQNYGRVQETYRDNPSQVPPRMQGNYMQPQQPAYQTTAPQQQFGGGDDFPEDLPF

SEQ ID NO: 400 - protein, 147 aa, Unknown
  Lactobacillus shenzhenensis LY-73
MINRVTLVGRLTQDVEVKHTESGIAVANFTVAVERHFKNAEGEKQADFVTCKMWRKSAENFANFTCKGSLVGILGEVRTHTYEKDGQKVYRTDIEADTFALLEPKAVTEARRAGTLKSGSGGGSDNVFAAAGANGEKIDITDDDLPF

SEQ ID NO: 401 - protein, 154 aa, Bifidobacterium magnum
MIQVTFTGNAGQDPETKTFNNGGSITQVNVGIGQGYKDRASGQWIDKGTAWVTVKANTSQTKETLQHVHKGTHLLVTGSLTVRTYQKQDGTQGTALDVNATAIAIIPRKQQQMQQPQQPMQQPVQQPQQQNTWASMPTGTDPWSQGSFNQEPEF

SEQ ID NO: 402 - protein, 159 aa, Borrelia duttonii
MISKEWKSGVGFMMMGVLMSDINNITLSGRLVKDSLLSYSSTNLAILNFSIANNIKVKREGEWEDNAQFFNCVLFGKRAETLFHFLSKGKQVVVNGSMRHEYYKNKHSEVNKIKSIIFVEQLRLFGADSKHHNPKVDIPIPVPPPVPDSACEFNEDIPF

SEQ ID NO: 403 - protein, 148 aa, Unknown
  Pseudomonas phage vB_PaeP_C1-14_Or,Pseudomonas phage vB_PaeP_p2-10_Or1,Pseudomonas phage PaP3
MRGVNKVILVGNVGGDPETRYMPNGNAVTNITLATSESWKDKQTGQQQERTEWHRVVFFGKLAEIVGQHVKKGQQLYVEGSLRTRKWQAQDGQDRYTTEIIVDMHGQMQMFGGKPGNEQAAQSRSSTQQQSAPQQRSAQDEFDDDIPL

SEQ ID NO: 404 - protein, 172 aa, Unknown
  Mycobacterium brisbanense
MAGDTTITVIGNLTADPELRFTPSGAAVANFTVASTPRTFDRQTNEWKDGEALFLRCNIWREAAENVAESLTRGSRVIVQGRLKQRSFETREGEKRTVVELEVDEIGPSLRYATAKVNKASRSGGGGGGFGGGGGGFSGGGGGSRQSEPKDDPWGSAPASGSFSGADDEPPF

SEQ ID NO: 405 - protein, 232 aa, Unknown
  Pseudoalteromonas lipolytica SCSIO 04301
MARGVNKVILVGNLGQDPEVRYMPNGNGVANISIATTDSWKDKNTGQMQERTEWHRVVLFGKLAEVAGEYLRKGSQVYIEGRLQTRKWTDQSGQEKFTTEIVVDMGGQMQMLGGRGGDQQGGGYQGGQSQGGYQGGQQQGGGYGGGSQQAQSNSYAPQQQSAPAPAQQQRPQQQPAPAPAPQQNNNQYGGYGQQQSSAPQQGGFAPKPQNAPQGGASNPMEPPIDFDDDIPF

SEQ ID NO: 406 - protein, 158 aa, Unknown
  Candidatus Accumulibacter sp SK-12
MASVNKVILVGNLGADPETRYLPSGDAVCNIRMATTDRSRDKVSGELKEYTEWHRVVFFGKLAETAGQYLKKGRQVYVEGRIRTNKWQDKEGNERYTTEIVANEMKMLGSREGMGAPAGEAEYGGSMPSAAGQAAGAARNAPARKTPGFEDMDDDIPF

SEQ ID NO: 407 - protein, 160 aa, Unknown
  Listeria phage B054,Listeria monocytogenes
MMNRVVLVGRLTKDPELRYTPAGVAVATFTLAVNRPFKNAQGEQEADFINCVVWRKPAENAANFLKKGSMAGVDGRVQTRNYEDSDGKRVFVTEVVAETVQFLEPKNINAEGATSNNYQNQANYSNNNKTSSYRADTSQKSDSFADEGKAIDINEDDLPF

SEQ ID NO: 408 - protein, 188 aa, Hydrogenovibrio marinus
MRGVNKVILVGTLGRDPEMKYAANGNAIANLSLATSENWTDKNSGQKQEKTEWHRVVIFGKLAEIAGQYLTKGSQIYLEGKLQTRKWQDQNTGQDRYSTEVVIDFNGQMQMLGGGNKPQGQGAAPQGQGFAGQQPPQGQPMANQQQQAPQQNQQPQAGNQAAMQNQAPPMQQAPAYPENDFGDDDVPF

SEQ ID NO: 409 - protein, 153 aa, Bacteriophage phig1e
MSINSVVLTGRLTKDVDLRATNSGKNVARFTLAVDRNFKSEQQADFFTVSVWGKQAENTAKYCHKGSLVGVRGHLRSGSYDKNGQKVYFVDIEADSVQFLDTRNNSQDAPQSENLGAQSDFGFQSGQTYHSGADNSQSTFNSFGGTSQNDYPF

SEQ ID NO: 410 - protein, 141 aa, Sphingobacterium antarcticus
MSGINKVILVGHLGKDPEVRHLDGGVTVASFPLATSETYNKEGKRIEQTEWHNIVLWRGLAEVASKYLQKGKLVYIEGKLRTRSFEDKERVKKYVTEVVAENFTLLGRKSDFENTPVAAATPKHENDYVEPEDNATGDLPF

SEQ ID NO: 411 - protein, 173 aa, Unknown
  Salinisphaera hydrothermalis C41B8
MASKGVNRAIILGNLGADPEVRHTAGGTAVANISVATSEVWTDKNSGEKQERTEWHRVVAFARLAEVMGEFLKSGSKVYIEGKIQTRKWQNREGQDVYTTEIVANELQMLDSKPQGNAGAQSRANNQAQNYGAASRGGAPARGGQQRQSPPQYQPPAGGDPGFDDDLDDDIPL

SEQ ID NO: 412 - protein, 198 aa, Unknown
  Endozoicomonas montiporae, Endozoicomonas montiporae CL-33
MARGVNKVILIGNLGGDPDVRFTPNGSAVANFNVATSESWTDKNTGQRQDRTEWHRVVVFGKLAEICQQYLRKGSKVYLEGKLQTRKWQDQQGQDRYTTEVVVDGFGGQMQMLDSRQDGGMGAVPNQMGGGYQQPQAAPQQQAPQQQAPQQRAPQQQYAAPQQQAQPQAQQRPAPAQQQAAPQPAAAGFDDFDDDIPF

SEQ ID NO: 413 - protein, 166 aa, Unknown
  Nitratireductor basaltis
MAGSVNKVILVGNLGADPEIRRLNSGDPVVNLRIATSETWRDRGTGERRERTEWHNVVIFNDNLAKVAEQYLKKGAKVYLEGQLQTRKWQDQQGQDRYTTEVVLQKFRGELQMLDTRGQGGDNQIGYGGGGGGGQRSDFGQSSPAEPSGGGGGGGYSRDLDDEIPF

SEQ ID NO: 414 - protein, 168 aa, Unknown
  Paenibacillus sp FSL R7-0331
MLNRIILIGRLTRDPELRYTPAGVAVTQFTLAVDRNFTGQNGEREADFIPVVTWRQLAETCANYLRKGRLAAVEGRIQVRNYENNEGKRVYVTEVIADNVRFLESSQNREGGNAPSGGSMPEEPAFGGGNGGNSARGNNNNFSRSNNNQDPFSGDGKPIDISDDDLPF

SEQ ID NO: 415 - protein, 182 aa, Burkholderia cepacia
MASVNKVILVGNLGADPEVRYLPSGDAVANIRLATTDRYKDKASGDFKEMTEWHRVAFFGRLAEIVSEYLKKGSSVYIEGRIRTRKWQGQDGQDRYSTEIVADQMQMLGGRGGSGGGGGGGDEGGYGGGYGGGGGRGGEQMERGGGGGRAGGAARGGAGGGQSRPSAPAGGGFDEMDDDIPF

SEQ ID NO: 416 - protein, 141 aa, Unknown
  Bifidobacterium reuteri DSM 23975
MGVNVSFTGNVGRDPETREFDNGRSLTTFSVGVSQGYYDQQNQWHDQGTMWITVECSPTAARQLPYVHKGVKLLVTGRLSQRFYQKKDGGQGSELRVYADAIGFLHRKDEQPQTGGFTGAQPQPPASDPWAAPQSDTEPEF

SEQ ID NO: 417 - protein, 119 aa, Unknown
  Lactococcus phage phi311,Lactococcus phage ul36k1t1,Lactococcus phage ul362,Lactococcus phage ul361,Lactococcus lactis,Lactococcus phage ul36k1
MAIITVTAQANEKNTRTVNTAKGDKKIISVPLFEKEKGSNVKVAYGSAFLPDFIQLGDTVTISGRVQAKESGEYVNYNFVFPTIEKVFISNDNGKQAQAKQDLFGGSEPIEVNTEDLPF

SEQ ID NO: 418 - protein, 177 aa, Unknown
  Helicobacter sp MIT 05-5294
MFNKVILVGNLTRDVELRYLPSGSALAKLGLAVNRRFKKQDGSQGDEVCYIDVNLFGRTAEVANQYLKRGSSVLIEGRLVLESWTDNNGQKRSKHSITAETMQMLGSRNEGGNYAGNGGGNGNYGNSYSNDSYNDMHNGGYNNYGSYQNTQPSAPKPQKPKENDIPEIDIDDEEIPF

SEQ ID NO: 419 - protein, 157 aa, Unknown
  Prochlorococcus phage P-SSM2
MNHCLLEVTVKVAPTIRYTQDNQTAIAEMDVEFDGFRADDPPGSIKVVGWGNLAQDLQSHVQIGQRLIIEGRLRMNTVPRQDGSKEKRAEFTLSKIHSSTPKGTISPNKTSPNQVPSNDSPSLNALTSKEPENPKSDNDSVTWNSSPLIPDTDDIPF

SEQ ID NO: 420 - protein, 148 aa, Unknown
  Flavobacterium phage 11b
MNRQEFIGHIGNDAEVKDLGINQVINFSVAVSESYVNKTTNEKITNTTWYECAKWGNNTQIAQYLKKGQQVYIMGKPNNRAWQNEQGDIKVVNAVKVTEILLLGGKQSNDNNAQPQQPQQQPQQPQQAPQPQNNEDFNNSEEHDDLPF

SEQ ID NO: 421 - protein, 159 aa, Unknown
  Paenibacillus sp P1XP2
MLNRVILIGRLTKDPELRYTPAGVAVTQFTLAVDRPFTSQGGEREADFIPVVTWRQLAETCANYLRKGRLTAVEGRIQVRNYENNEGRRVYVTEVIADNVRFLESNREGGSGGGQGPREESSFGGGSRENNNYSRSNSNQDPFFDDGKPIDISDDDLPF

SEQ ID NO: 422 - protein, 180 aa, Unknown
  Mameliella alba
MAGSVNKVILVGNLGRDPETRTFQNGGKVCNLRIATSENWKDRNTGERRERTEWHSVAIFSEPLARIAEQYLRKGSKVYIEGQLETRKWQDQNGQDRYSTEVVLRPYRGELTLLDSRSEGGGGGGFGGGSGGGYGGGGGGYDDRGGYDDPGYGGGSGGGSGGGSGPSRAPARDIDDEIPF

SEQ ID NO: 423 - protein, 160 aa, Unknown
  Sulfurovum sp FS06-10
MNQFTGLGNLTRDIELRYLQNGSAIATCGLAMNRRFKKQDGTQGEEVCFIDITFFGRTAEIANQYLSRGRKVLIIGRLKLDQWTDQQGVKRSKHSIHVESLEMIDSQNSEAQSTHPQPQAHNNQTQRQPQNTPRQPQSNPGQYSGHDIPDIDINDDEIPF

SEQ ID NO: 424 - protein, 155 aa, Unknown
  Streptomyces cyaneogriseus
MNETMICAVGNVATHPVYRELASGPSARFRLAVTSRYWDREKSAWTDGHTNFFTVWAHRQLAANAAASLAVGDPVMVQGRLKVRTDVREGQSRTSADIDAVAIGHDLTRGTSAFRRTNKPDSASTSPRPEPNWETPAAESGDPSEQQPTGEPALM

SEQ ID NO: 425 - protein, 230 aa, Unknown
  Thalassomonas phage BA3
MAGVNKVIILGNLGKDPEVRFMPNGGGVANLTIATSETWKDKQTGEQKEKTEWHRVVMFGKLAEIAGEYLKKGSKVYIEGQLQTRKWQNQQGQDQYTTEIVVQGFNGTMQMLDSRGQGGGGQGGGFQGQQQGGFSGGQQAPQQQGGFQQQAPKQQGGFSQQAAPQQQGGFAQQAPQQQAPQQGGFSGGQQAPQQGGFQQQQGGFGQQNQQQAAKVNPQEPSIDFDDDIPF

SEQ ID NO: 426 - protein, 142 aa, Unknown
  Clostridium sp FS41
MNSAQLVGRLTRDPEVRYSDGGTTVARFTLAVDRRFKKDGGDDADFINCVAFGKTAEFLEKWFRKGQRLGLTGRIQTGSYVNQEGTKVYTTEVVVENVEFVESKGASAGDGGPQQRPAPTSAIGDGFMNIPDGVEDDGLPFN

SEQ ID NO: 427 - protein, 160 aa, Unknown
  Acetobacter orientalis 21F-2
MAGSVNKVILVGNLGKDPEVRTTQGGQKIVSFSLATSDTWNDRQSGERRERTEWHRVVVFNERLADVAERFLRKGRKVYLEGALQTRKWTDQSGQERFTTEVIVERFRGELVLLDSRADNEGGQSNQQPQPREQPRQQGGYGQQSNGWGGSSDLDDSIPF

SEQ ID NO: 428 - protein, 165 aa, Unknown
  Microbacterium ginsengisoli
MAGETVITVVGNLTADPELRYTQNGLPVANFTIASTPRTFDRQANEWKDGEALFLRASVWREFAEHVAGSLTKGSRVIATGRLRQRSYQDRDGNNRTAIELEVDEIGPSLRYATAQVTRAAGGSGAGGGGSRAQVADEPWSTPGSSNSSADAWSAPGAYGDDTPF

SEQ ID NO: 429 - protein, 116 aa, Unknown
  Staphylococcus phage SA97,Staphylococcus phage phi7247PVL,Staphylococcus phage phiETA3,Staphylococcus aureus, Staphylococcus phage phi5967PVL
MNTVNLIGNLVADPELKGQNNNVVNFVIAVQRQFKNKQTNEYETDFIRCVAFGKTAEIIANNFNKGNKIGVTGSIQTGSYENNQGQKVFTTDIAVNNITFVERKNTQAKHGLLTRN

SEQ ID NO: 430 - protein, 169 aa, Unknown
  Salinicoccus halodurans
MLNRVVLVGRLTKDPDLKVSQNNISVATFTLAVNRPFTSSNGERGADFINCVVFRKQAENVNQYLKKGSLAGVDGRLQSRTYDNKDGQRVFVTEVVCDSVQFLEPKGQGGNQQQQYNNNSADSYTNAYGNQSTGSRPAPQQQSRQDNAEENPFANADGPVDISDDDLPF

SEQ ID NO: 431 - protein, 181 aa, Unknown
  Lactobacillus phage phiadh
MINRVVLVGRLTRDPDLRYTNSGTSVASFTVAVDRNFTNQQGNREADFINCVVWGKSAENFANFTHKGSLVGIEGRIQTRSYENQQGNRVYVTEVVTENFSLLESKAESDRYRAQHGGSASSAPRQQSQSSFGGNPYGAPANNQGSYQQDNAYGNGNNDAMQDPFAGNGSKTDISEDDLPF

SEQ ID NO: 432 - protein, 166 aa, Unknown
  Microgenomates group bacterium GW2011_GWF1_44_10
MSSRSLNKVQIIGNLTRDPELRYTPQGTAVCQIGVATNRSWTNDAGEKNEETEFHKVVAWSKLAEICSQLLKKGRKIYLEGRLQTRDWTTQDGQKRQTTEIVMDNMILLDSAGRGGDGEGASTSYTNDDTSSKPVAKKSKKADVADDASSAEEAPVAEDVSDDIPF

SEQ ID NO: 433 - protein, 152 aa, Unknown
  Parcubacteria group bacterium GW2011_GWA2_42_14
MNLNKAFVLGNLTRDPELRTTTTGQSVAQFGVATNREFTDKSGQRQKLTEFHNIVAWGKLGELCHQYIKKGQSVFVEGRIQTRSWDDKQTGQKKYRTEIVAENVQFGPKPFRNETAGQNQAQPETPKEKEEILETVQYPADEEEIKPEEIPF

SEQ ID NO: 434 - protein, 188 aa, Unknown
  Labilithrix luteola
MAEGLNKVMLLGNLGADPELKMTAGGQAVLKLRLATTETYLDRNNSRQERTEWHSVTLWGKRGEALAKFLSKGERIFVEGSLRTSSYEKDGEKRYRTEINATNVILAGRAGRGAGDEMGGGGGGGGGFGGGGGGGGGGGGGGFERRAPSRSGGGGGGGFEGGGRGAPASAPPADDFGDYPGGDDEIPF

SEQ ID NO: 435 - protein, 174 aa, Unknown
  Sphingopyxis sp (strain 113P3)
MAGSVNKVILIGNLGADPEIKSFQNGGKIANIRIATSESWKDRMTGERKERTEWHNVVINGDGLVGVVERYLKKGSKVYIEGSLRTRKWQDRDGNDRYTTEVVVAGMGGSLTMLDGAPGGGGSRTSGDSWNQGGGSSGGWDQGGSSGGGWNQGGGSSGGGRPPFDDDLDDDVPF

SEQ ID NO: 436 - protein, 167 aa, Unknown
  Actinobacteria bacterium OK074
MSNETIITVVGNLVDDPELRWTSSSVAVAKFRIASTPRTFDKQTNEWKDGESLFLTCSVWRQAAEHVAESLQRGMRVIVQGRLKQRSYEDREGVKRTVYELDVEELGPSLRNATAKVTKAGGSGQAREALQQARTRSSREGREDPWASSGAAAESAQAGAWGDAPPF

SEQ ID NO: 437 - protein, 169 aa, Unknown
  Thermus phage phiYS40
DFIDPLEGRGRETLEDARGQPRLRHALNQVILMGNLTRDPDLRYTPQGTAVARLGLAINERRPGQGPDGERTHFIEVQAWRDLAEWAEELKRGEGLLVIGRLVNDSWTSSTGERRFQTRVEALRLERPTRGPERTGGSRPQEPERSVQTGGVDIDEGLEDFPPEEDLPF

SEQ ID NO: 438 - protein, 158 aa, Unknown
  Lentibacillus amyloliquefaciens
MMNRVVLVGRLTRDPDLRYTPNGVAVANFRIAIDRPFSNQQGNRDADFINCVVWRRAAENLATYMKKGSMIGVDGRIQSRSFEGRDGNTVFVTEVVADNIQFLESKGTSQSRDQQPSGFQPNQNQNQNQNQTTQTQTNENPFKDNGEPIDISDDDLPF

SEQ ID NO: 439 - protein, 146 aa, Unknown
  Phormidium phage Pf-WMP3
MAEIVQDPQLRYTSDNQTAITELLVQIDPLRDGDPPETLKVVAWRRLAEAVQENFHRGDRVVIEGRLGMVVFDRPEGFREKRAEVTAQRIHLLDRAAAGSAPPAAPTAAVPSSAPVTPMNGPANTPANAPAPVSSPDEPLSDDIPF

SEQ ID NO: 440 - protein, 175 aa, Unknown
  Lactobacillus capillatus DSM 19910
MINRAILVGRLTRDPDLRYTANGVAVATFTVAVNRQFTNQQGEREADFINCVIWRKSAENFANFTHKGSLVGVDGRIQTRSYENQQGNRVYVTEIVVDSFSLLESRSQSERYQQQHGADTQGSAPSQNSSNPNNDNLFGNSTKNNPPKARENNTDVDPFADSGKQIDISDDDLPF

SEQ ID NO: 441 - protein, 146 aa, Unknown
  Candidatus Cloacimonas sp SDB
MTSELRLPRVNYVVLSGRLTRDVDLRFIPNGTPVAKLSLAFDRNYQKDGEWQQETSYIDVVVWSKRGEQCAEYLQKGSPVLIEGYIKTRSYQDKDNNNRKVTEIIASKINFLEKKPYSSEDDSETKNDSSDTNKSKADIIDDDVPF

SEQ ID NO: 442 - protein, 184 aa, Unknown
  Roseateles depolymerans
MASVNKVIILGNLGRDPELRYTPSGSAVCNVSIATTRNWKSREGGERQEETEWHRVVFYDRLAEIAGEYLKKGRPVYVEGRLKTRKWQDKEGKDNYTTEIIAETMQLLGGRDGGDDMGGGGGGGYNRERSSGGSRESSGGGSGRDAGDFDSPRAPAPRSAPRPAPAPAAKPATGFDDMDDDIPF

SEQ ID NO: 443 - protein, 147 aa, Unknown
  Parcubacteria bacterium 32_520
MNYNRAILCGRVTKAPEILMTPSGHKVAKISLATNEYQGKGKEEKTVFHNLIAWDRTADIAQQYIVVGHEIMIEGRIDNRTYKKKDGTKGYISEVVIDRLQLGNKPRAVAVPAENTATSNYQEPPADDDNVPVIEDMDEIDISSIPF

SEQ ID NO: 444 - protein, 195 aa, Unknown
  Streptomyces longwoodensis
MAGETVITVIGNLVDDPELRFTPSGAAVAKFRVASTPRTFDRQTNEWKDGESLFLTCSVWRQAAENVAESLQRGMRVLVQGRLKQRSYEDREGVKRTVYELDVEEVGPSLRNATAKVTKTAGRGGQGGGGGFGGGGGGQQGGGWGGGPGGGQQGGGAPADDPWATGAPAGGAQQGGGGWGGGSGGGGGYSDEPPF

SEQ ID NO: 445 - protein, 192 aa, Streptomyces albus
MAGETVITVVGNLVDDPELRFTPSGAAVAKFRVASTPRTFDRQTNEWKDGESLFLTCSVWRQAAENVAESLQRGMRVIVQGRLKQRSYEDREGVKRTVFELDVDEVGASLRNATAKVTKTSGRGGQGGYGGGGGQGGGGWGGGSGGGQQGGGAPADDPWATGAPSGGQQGGGGGGWGGGSGNSGGYSDEPPF

SEQ ID NO: 446 - protein, 155 aa, Unknown
  Pirellula sp SH-Sr6A
MASYNRVILLGNLVRDIELKYTTSRLAVCQNAIAVNERRKNAAGEWVDETSFVDVTFFGRTAEVVAEYLGKGSPIFVEGKLKQDTWEKDGQKRSKLYVIVDRMQLIGSRNESKGSGAPRPQSNGNRFADQEQHVSPDMHVSEVGDGGFIDEDMPF

SEQ ID NO: 447 - protein, 167 aa, Bacillus sporothermodurans
MMNRVVLVGRLTKDPDLRYTPSGVAVATFTLAVNRTFTNQQGEREADFINCVVWRKPAENVANFLKKGSLAGVDGRLQTRNYEGQDGKRVYVTEVVAESVQFLEPRNANANPNRGGNNDFYGGGQGNQNTPFNQNQNQRNQGYTRVDEDPFSNDGQPIDISDDDLPF

SEQ ID NO: 448 - protein, 165 aa, Unknown
  Akkermansia sp KLE1798
MANLNKVFLMGNLTADPELRYTPKGTAVTDIRLAINRYYAGDNSERQEETTFVDVTLWNRQAEVAGNYLSKGRGVFVEGRLQLDSWEDKASGQKRTKLRVIGENIQLFPRGGDSSDMGGAPRQQSAPRSNNYGQSQAPQNYNPPPMPSNQQQSNDFGDMDDEIPF

SEQ ID NO: 449 - protein, 154 aa, Unknown
  Coriobacteriales bacterium DNF00809
MSINRVILSGNLTRTPELRSTANGSSVLGFGIAVNDRRKNPQTGEWEDFPNFIDCTVFGPRAEGLSHCLDKGSKISLEGKLRWSQWERDGQRRSKLEVIVDEIELMSTRGGQNFAANDHASADAGSYSQPYNAPSTPAAPPAVDPSSYNADLPF

SEQ ID NO: 450 - protein, 192 aa, Unknown
  Streptomyces albulus
MAGETVITVVGNLVDDPELRFTPSGAAVAKFRVASTPRTFDRQTNEWKDGESLFLTCSVWRQAAENVAESLQRGMRVVVQGRLKQRSYEDREGVKRTVFELDVEEVGPSLKNATAKVTKTTGRGGQGGYGGGQQGGGNWGGAPGGGQQGGGAPADDPWATSAPAGGQQQGGGGNWGGSSGGSGGGYSDEPPF

SEQ ID NO: 451 - protein, 166 aa, Unknown
  Salmonella phage SETP3
MARGVNKVIIVGTLGNDPEVKYSASGSAIVNISVATSEQWKDKQTGEKKEQTEWHRIVIFGKLAEVAGEYLRKGSQVYIEGQLRTRKWTDSNGIDRYTTEIVIPQMGGVMQMLGGKRDDSGQQPRQQSGQQPQGGWVTNQQQQPQKQQSPQGGNEPPMDFSDDIPF

SEQ ID NO: 452 - protein, 196 aa, Streptomyces noursei
MAGETVITVVGNLVDDPELRFTPSGAAVAKFRVASTPRTFDRQTNEWKDGESLFLTCSVWRQAAENVAESLTRGTRVIVQGRLKQRSYEDREGVKRTVYELDVEEVGASLRNATAKVTKTGGRGGQGGGGFGGGQGGGQQGGGWGGGPGGGQQGGGAPADDPWATGGPSGGGQGGGGGWGGGSGGSGGGYSDEPPF

SEQ ID NO: 453 - protein, 172 aa, Unknown
  Synechococcus phage Syn5
MNHCLLEVEVIEAPQLRYTQDNQTPVAEMSVQFEGLRPDDPSGQIKVVGWGNLAQDLQNRVQVGQRLMLEGRLRISTITRADGLKEKRAEFTLSRLHPLAEGPSPAGDTRPAPLPPAGGQPRSVPRPVPARAAVAGSTTAAAAIPATPAPEVPTWNTSPLVPELSDDDDIPF

SEQ ID NO: 454 - protein, 167 aa, Actinophage VWB
MAGETPITVVGNVVADPELRFTPSGAPVANFRVASTPRTFDRVTNEWKDGDTLFLSVSVWRQQAENVAESIKRGDRVIVVGRLGQRQYEKDGERKSSYEVQAEDVGPALKNATAQVAKNGQQNGQQRAQGYGQGYGQQAPQQGYGAPQADQWSTQQPRQGYTDEPPF

SEQ ID NO: 455 - protein, 166 aa, Unknown
  Lactococcus lactis subsp cremoris (strain MG1363)
MINNVVLVGRITRDPELRYTPQNQAVATFSLAVNRQFKNANGEREADFINCVIWRQQAENLANWAKKGALIGVTGRIQTRNYENQQGQRVYVTEVVADSFQMLESRSARDGMGGGASAGSYSAPSQSTNNTPRPQTNNNSATPNFGRDADPFGSSPMEISDDDLPF

SEQ ID NO: 456 - protein, 129 aa, Unknown
  Lactococcus lactis subsp cremoris (strain MG1363)
MNKTMLIGRLTNAPEISKTTNNKSYVRVTLAVNRRFKNEKGEREADFISIIIWGKSAETLVSYAKKGSLISVEGEIRTRNYTDKNEQKHYITEILGLSYDLLESRATLALRESAVKTEELLLEADELPF

SEQ ID NO: 457 - protein, 141 aa, Unknown
  Lactococcus lactis subsp cremoris (strain MG1363)
MINNVTLVGRITKKPELRYTPQNKAVATFTLAVNRAFKNANGEREADFISCVIWGKSAENLANWTHKGQLIGVIGNIQTRNYENQQGQRVYITEVVASNFQVLEKSNQANGERVSNPAAKPQNNDSFGSDPMEISDDDLPF

SEQ ID NO: 458 - protein, 170 aa, Mycobacterium smegmatis
MNMFETPFTVVGNIITNPVRLRFGDQELYKFRVASNSRRRSPEGTWEPGNSLYVTVNCWGNLARGVSASLGKGDSVVVVGHLYTNEYEDREGVRRSSVEVRATAVGPDLSRCIARVEKVQPSQGPRADAGGDPERVPDDDVDRRDADDEPDDLADDDVADLAGDGLPLTA

SEQ ID NO: 459 - protein, 156 aa, Staphylococcus aureus
MLNRTILVGRLTRDPELRTTQSGVNVASFTLAVNRTFTNAQGEREADFINIIVFKKQAENVNKYLSKGSLAGVDGRLQTRNYENKEGQRVYVTEVIADSIQFLEPKNSNDTQQDLYQQQVQQTRGQSQYSNNKPVKDNPFANANGPIELNDDDLPF

SEQ ID NO: 460 - protein, 167 aa, Staphylococcus aureus
MLNRVVLVGRLTKDPEYRTTPSGVSVATFTLAVNRTFTNAQGEREADFINCVVFRRQADNVNNYLSKGSLAGVDGRLQSRNYENQEGRRVFVTEVVCDSVQFLEPKNAQQNGGQRQQNEFQDYGQGFGGQQSGQNNSYNNSSNTKQSDNPFANANGPIDISDDDLPF

SEQ ID NO: 461 - protein, 141 aa, Staphylococcus aureus
MLNRTVLVGRLTKDPELRSTPNGVNVGTFTLAVNRTFTNAQGEREADFINVVVFKKQAENVKNYLSKGSLAGVDGRLQTRNYENKDGQRVFVTEVVADSVQFLEPKNNNQQQNNNYQQQRQTQTGNNPFDNNADSIEDLPF

SEQ ID NO: 462 - protein, 167 aa, Caulobacter crescentus
MAGSVNKVILVGNLGADPEIRSLGSGDRVANLRIATSETWRDRSSGERKEKTEWHRVVIFNDNLVKVAEQYLRKGSTVYIEGALQTRKWTDNTGQEKYSTEIVLQKFRGELTMLGGRGGDAGMSSGGGDEYGGGYSGGGSSFGGGQRSQPSGPRESFSADLDDEIPF

SEQ ID NO: 463 - protein, 179 aa, Vibrio natriegens
MASRGINKVILVGNLGNDPEIRYMPNGGAVANITIATSDSWRDKATGEQREKTEWHRVVLFGKLAEVAGEYLRKGSQVYVEGQLQTRKWQDQSGQDRYSTEVVVQGFNGVMQMLGGRAQGGAPAMGGQAPQQGGWGQPQQPAQPQYNAPQQQAPKQSAPQQPQQQYNEPPMDFDDDIPF

SEQ ID NO: 464 - protein, 121 aa, Synechocystis PCC6803
MSVNSIHLVGRAGRDPEVKYFESGNVVCNFTLAVNRRTSKKDEPPDWFDLEIWGKTAEIAGNYVKKGSLIGIQGSLKFDHWEDRNSGTPRSKPVIRVNNLDLLGSKRDNAEATMNNYPEEF

SEQ ID NO: 465 - protein, 129 aa, Synechocystis PCC6803
MNSFVLMATVIREPELRFTKENQTPVCEFLVEFPGMRDDSPKESLKVVGWGNLANTIKETYHPGDRLIIEGRLGMNMIERQEGFKEKRAELTASRISLVDSGNGINPGELSSPPEPEAVDLSNTDDIPF

SEQ ID NO: 466 - protein, 197 aa, Streptomyces albus
MAGETVITVVGNLVDDPELRFTPSGAAVAKFRVASTPRTFDRQTNEWKDGESLFLTCSVWRQAAENVAESLQRGMRVIVQGRLKQRSYEDREGIKRTVYELDVDEVGASLRNATAKVTKTTGRGGQGGYSGGGGGGGQQGGWGGGPGGGQQQGGGGAPADDPWATSAPSGGGQQQGGGGGWGGSSGGGGGYSDEPPF

SEQ ID NO: 467 - protein, 210 aa, Streptomyces albus
MNETMVTVVGNVATAPVYRESAHGPMARFRMAATPRRWDRERQTWTDGPTSFFTIWTTRQLASNVTASVTVGEPVIVQGRLRVRETERGGQQWTTAEIDAASVGHDLTRGTAAFRRVRKPVGTWPGGTATEDSRSAAAAQRAAGEPDWSVSGVGAGGDWGVAGGDRSGGGGEEPAEAGDRAEASAGTGTGTGTGGGEPEVEAVSPGPGAA

SEQ ID NO: 468 - protein, 156 aa, Streptomyces coelicolor
MNETMICAVGNVATTPVFRDLANGPSVRFRLAVTARYWDREKNAWTDGHTNFFTVWANRQLATNASGSLAVGDPVVVQGRLKVRTDVREGQSRTSADIDAVAIGHDLARGTAAFRRTARTEASTSPPRPEPNWEVPAGGTPGEPVPEQRPDPVPVG

SEQ ID NO: 469 - protein, 199 aa, Streptomyces coelicolor
MAGETVITVVGNLVDDPELRFTPSGAAVAKFRVASTPRTFDRQTNEWKDGESLFLTCSVWRQAAENVAESLQRGMRVIVQGRLKQRSYEDREGVKRTVYELDVDEVGASLRSATAKVTKTSGQGRGGQGGYGGGGGGQGGGGWGGGPGGGQQGGGAPADDPWATGGAPAGGQQGGGGQGGGGWGGGSGGGGGYSDEPPF

SEQ ID NO: 470 - protein, 148 aa, Unknown
  Synechococcus sp UTEX 2973
MNSCILQATVVEAPQLRYTQDNQTPVAEMVVQFPGLSSKDAPARLKVVGWGAVAQELQDRCRLNDEVVLEGRLRINSLLKPDGNREKQTELTVTRVHHLTLDSATGILAQEESEVSYGRSAAASAPVKASPVVTPTAAPDVDYDDIPF

SEQ ID NO: 471 - protein, 120 aa, Unknown
  Synechococcus sp UTEX 2973
MSLNVVNLVGRVGRDPEARYFESGSVVCKFSLAVNRRSRNDEPDWFNVEMWGREAQVAIDYVKKGSLIGISGALKIESWTDRNNNQRTTPVVRANRLELLGSRRDQEGGMAPRDPDSDLF

SEQ ID NO: 472 - protein, 165 aa, Pseudomonas aeruginosa
MARGVNKVILVGNVGGDPETRYMPNGNAVTNITLATSESWKDKQTGQQQERTEWHRVVFFGRLAEIAGEYLRKGSQVYVEGSLRTRKWQGQDGQDRYTTEIVVDINGNMQLLGGRPSGDDSQRAPREPMQRPQQAPQQQSRPAPQQQPAPQPAQDYDSFDDDIPF

SEQ ID NO: 473 - DNA, 786 bp, Artificial Sequence
  Synthetic Polynucleotide
atgagtactgcacttgcaacattagctggcaagttagcagagcgtgttggtatggattcagtcgaccctcaggagcttataactaccttacgtcaaacagcgttcaagtgtgacgcctctgatgcacaatttatcgctttgcttatcgtagctaaccagtatgggttgaatccttggacgaaggagatatacgctttcccggataagcagaacggtattgttcctgtagtaggtgtcgatggatggagtagaattatcaatgaaaatcaacagttcgatggcatggacttcgagcaggataatgaatcatgtacctgccgtatatatagaaaagaccgaaatcacccaatttgtgtgactgaatggatggatgagtgcagacgtgagccgttcaagacccgagaaggccgtgaaatcactggtccgtggcaatcacatccaaagagaatgttgcgtcacaaggcgatgattcagtgcgcccgtttagcttttgggtttgctggcatttacgacaaggacgaagctgaaagaatcgttgaaaacactgcatataccgctgaacgacaaccggagcgtgacattacgccagtgaatgacgagacaatgcaggaaattaacacgttgttgattgctttggacaaaacgtgggacgacgacttgttaccactttgtagccaaatttttcgtcgagacattagagcttcatctgagcttacacaagctgaagccgtcaaggcattggggtttttgaaacaaaaagctaccgaacagaaggtagcggcataa

SEQ ID NO: 474 - protein, 261 aa, Bacteriophage Lambda
MSTALATLAGKLAERVGMDSVDPQELITTLRQTAFKCDASDAQFIALLIVANQYGLNPWTKEIYAFPDKQNGIVPVVGVDGWSRIINENQQFDGMDFEQDNESCTCRIYRKDRNHPICVTEWMDECRREPFKTREGREITGPWQSHPKRMLRHKAMIQCARLAFGFAGIYDKDEAERIVENTAYTAERQPERDITPVNDETMQEINTLLIALDKTWDDDLLPLCSQIFRRDIRASSELTQAEAVKALGFLKQKATEQKVAA

SEQ ID NO: 475 - DNA, 498 bp, Artificial Sequence
  Synthetic Polynucleotide
atggcccgtggagtgaacaaagtaattcttgtcggtaatgtgggtggggatccagagacgcgatacatgccaaacgggaacgccgtgacaaatatcaccttagccacgagcgaatcttggaaggacaaacaaacaggtcagcaacaagaacgaaccgaatggcatagagttgtattttttggccgacttgctgagatcgcgggtgagtaccttagaaagggttctcaggtttatgtcgagggctcattaagaacacgtaagtggcaggggcaggacgggcaagaccgatatacaactgaaatagtagtggacataaacggcaacatgcaacttcttggtggcagaccgagtggggacgattcacagagagctccaagagaacctatgcagcgaccacagcaggctcctcaacagcagtctcgtccggcccctcagcagcaaccggctccgcaacctgcacaagattacgatagttttgatgatgatattccattctaa

SEQ ID NO: 476 - DNA, 747 bp, Artificial Sequence
  Synthetic Polynucleotide
atgggaaccgcccttacacctcttttgacaaagttcgcaaccagatatgagatgggaacgacccctgaagaggttgctaatacattgaaacaaacatgcttcaagggacaggtcaacgacagtcaaatggtagcccttttgatagtcgctgaccagtacaagttaaacccgttcaccaaggagttgtatgcattccctgacaagaataatggaatcgtgccagttgttggtgtcgatggatgggcgagaataataaacgagaaccctcagtttgatggtatggaattttctatggaccagcagggcactgagtgcacgtgcaaaatctatcgtaaggatcgttctcacgcaataagcgctacggaatatatggccgaatgtaagagaaatacgcaaccttggcaaagtcacccacgacgtatgttaagacataaagccatgatccagtgtgcgcgattagcattcggcttcgctggtatctacgatcaagacgaagcggaacgaatagtcgaaagagacgttactccggcggagcagtacgaagatgtcagcgaagctatatgcttgattaaggacagcccgacgatggaggatttacaggcagcgttcagcaatgcctggaaggcgtataaaaccaaaggtgcaagagaccaattgacagccgccaaggatcagcgtaaaaaggaattacttgatgccccaatagatgtcgagttcgaagaaactggcgatgatagagcagcataa

SEQ ID NO: 477 - DNA, 1062 bp, Artificial Sequence
  Synthetic Polynucleotide
atggcagaaaacgccgtgacgaaacaagactcacctaaagccccagaaacgatatcacaggtccttcaagtgttagtacctcaattagctcgagccgtacctaagggaatggatcctgatagaatagctcgaatcgtccagaccgagatcagaaagagtagaaatgcgaaagcggcgggaatcgccaaacagtcattggatgactgcacgcaagaaagcttcgccggggcgttacttacaagtgcggcattgggccttgagccaggcgttaacggtgagtgttatcttgttccatacagagacacaagaagaggtgtcgtcgagtgccagttaattatcgggtatcaaggaatcgttaaattgttttggcaacatccgcgagcctctcgaatagacgcccagtgggtgggggcaaacgatgaattccattatacaatgggtcttaacccaaccttaaaacatgtaaaggctaagggagaccgaggaaacccagtatatttttatgctatcgtagaggtcacgggtgccgagcctttgtgggatgtcttcacagctgatgagattagagagttgagaagaggtaaagtcggttcaagcggggatattaaggatccgcagagatggatggagcgaaagacagcgttaaaacaagtgcttaagcttgctccaaaaactactcgtttggacgcagcaatacgagcggacgatagaccgggaacagatttgtctcaaagccaggcgttggcattacctagtacagttaagccaacagcagactacatagacggtgagattgcagagccacacgaggttgacactccgcctaaaagcagtcgagcacaacgagctcagagagcgactgccccagccccagacgttcagatggccaatccggatcaattaaagcgtttgggagagattcaaaaagccgaaaagtacaatgatgccgactggtttaagttcttagctgatagtgcaggggtgaaagcgacaagagcagctgatcttacatttgatgaagcaaaagctgtaatagatatgttcgacggcccaaatgcttga

SEQ ID NO: 478 - DNA, 930 bp, Artificial Sequence
  Synthetic Polynucleotide
atggctaatcaagtagcacaacagcagaaaccgactaagctaaccgatcttgtattagatcgtgttaaacaaatgcaagacacgcaggacttgtcactacccaagaattacaacgcttctaatgcgttgaatgcagcctttctcgaattacaaaaagtacaagaccgtaatcatcggccagccttagaagtatgttctcatgactcgattgttaagtccttgttagatatgacactgcaagggctatccccagcaaaagatcaatgctacttcatcgtatacggcaatgagcttcaaatgcaacggagctatttcggtactgttgcagcagttaagcgactggatggtgttaagaaagttagggcagaagttgttcacgaaaaagatgactttgaaattggtgctaatgaagacatggagctagtcgttaagaggttcgttcctaagtttgaaaatcaagataatcaaattattggagcttttgccatgattaagactgatgaaggtactgactttactgttatgactaagaaagagattgatcagtcatgggcacaaacacgtcaaaaaaataacaaagtacagcagaattttagccaagaaatggcaaagcgtactgtgcttaatcgtgccgctaagatgtttattaacacgtctgatgatagtgaccttttaactggtgctatcaacgatacaacaagcaacgaatacgatgatgagcgtcgagatgtaacgcccgttgaggatgaaaaacaaagtactgataaattgctagaaggatttcaaaagtcacaagaagcgaaggctaagtgggtaagtaatgatggcaacagcaacgaaggcaaagaaaccagtgaagaagtcgcagacggacaaacagaactcttcagcgaagggacaatcaaaccagccgatgaagctgacagctaa

SEQ ID NO: 479 - DNA, 786 bp, Artificial Sequence
  Synthetic Polynucleotide
atgagtactgcactcgcaacgctggctgggaagctggctgaacgtgtcggcatggattctgtcgacccacaggaactgatcaccactcttcgccagacggcatttaaaggtgatgccagcgatgcgcagttcatcgcattactgatcgttgccaaccagtacggccttaatccgtggacgaaagaaatttacgcctttcctgataagcagaatggcatcgttccggtggtgggcgttgatggctggtcccgcatcatcaatgaaaaccagcagtttgatggcatggactttgagcaggacaatgaatcctgtacatgccggatttaccgcaaggaccgtaatcatccgatctgcgttaccgaatggatggatgaatgccgccgcgaaccattcaaaactcgcgaaggcagagaaatcacggggccgtggcagtcgcatcccaaacggatgttacgtcataaagccatgattcagtgtgcccgtctggccttcggatttgctggtatctatgacaaggatgaagccgagcgcattgtcgaaaatactgcatacactgcagaacgtcagccggaacgcgacatcactccggttaacgatgaaaccatgcaggagattaacactctgctgatcgccctggataaaacatgggatgacgacttattgccgctctgttcccagatatttcgccgcgacattcgtgcatcgtcagaactgacacaggccgaagcagtaaaagctcttggattcctgaaacagaaagccgcagagcagaaggtggcagcatga

SEQ ID NO: 480 - DNA, 747 bp, Artificial Sequence
  Synthetic Polynucleotide
atgggtactgctctaacgccgttattaaccaagtttgccacccgctatgagatgggaactacccccgaagaggtcgctaatacgctgaaacagacttgtttcaagggccaagtgaacgatagtcagatggtagcccttttgatcgttgcggatcaatataagctcaatccattcacaaaagagctctacgcgttccctgacaaaaataatggtattgttccagttgtgggagtcgatggttgggctagaattattaacgagaatccccagtttgatgggatggaattcagtatggatcaacagggaactgaatgcacttgtaaaatttaccgcaaagaccgctcgcacgccatcagcgccaccgagtacatggctgagtgcaaaaggaacactcaaccttggcagtctcacccgcgacgtatgctgcgtcataaggctatgattcaatgcgccagactagcctttggtttcgcggggatctacgatcaggatgaggccgaacgcattgttgaacgagatgtaactcccgccgagcaatacgaggatgtatccgaagcgatttgtctgatcaaagactcaccaactatggaggacttgcaggccgcgttctcaaacgcgtggaaagcttacaagactaaaggtgcccgtgatcaactgactgctgctaaagaccagagaaaaaaggagctgttggatgcgcccattgatgtcgaattcgaagaaactggagatgatcgtgctgcgtaa

SEQ ID NO: 481 - DNA, 1062 bp, Artificial Sequence
  Synthetic Polynucleotide
atggccgagaatgccgtcacgaaacaggattcccctaaggcaccggaaaccattagtcaagtgcttcaggtgctggtcccacaattggctcgtgcagtacctaaaggcatggatcctgatcgtattgcacgtatcgtacagacggagattcgcaaatcccgcaacgcaaaagccgctggaatcgcaaagcaaagtttagacgattgcacacaggagtcctttgcgggagccttactgacctcagcggctttagggttagagccaggcgtcaatggggagtgttatctggtaccctatcgtgatacacgccgtggtgtggtcgagtgccaactgattattggatatcaagggattgtcaaacttttttggcaacatccgcgcgcgagccgcatcgatgcgcaatgggttggcgcgaacgacgagttccattatacgatgggacttaatcctaccttgaaacatgtaaaggcaaaaggtgatcgtggaaacccggtctacttttacgccatcgtcgaggtgaccggtgctgagcccttatgggatgtttttactgctgatgaaattcgtgaacttcgtcgtggcaaggttggatcgtctggagatattaaggacccccagcgttggatggaacgcaagacagcattgaaacaggtactgaaattggctcccaaaaccacacgcctggatgcggcgatccgcgctgatgatcgtccagggactgacctttcacagtcgcaggctctggccttaccgtctaccgttaagcctaccgcagactatattgatggggagatcgccgaaccgcatgaagtcgatacaccaccaaagagttcacgtgctcaacgcgcacaacgtgccacggcaccggctcctgatgtgcaaatggccaaccccgaccaattgaagcgtctgggggagatccaaaaggcggagaagtacaatgatgccgactggttcaagtttttggcggactccgccggtgtgaaagcgacgcgtgctgctgatcttacgtttgatgaagcaaaggctgtaatcgacatgtttgatgggccaaacgcgtga

SEQ ID NO: 482 - DNA, 930 bp, Artificial Sequence
  Synthetic Polynucleotide
atggcgaatcaagttgcacagcaacaaaaaccgacaaaattaaccgatctggttttggatagagtcaagcagatgcaagacacccaggaccttagccttccgaaaaactataacgcatccaatgcactgaatgccgcgtttttagaattgcagaaggtacaagaccggaaccacagaccagcactggaagtctgctcgcacgattctattgtaaaatcgctgttggacatgactttgcagggcttatcccctgcgaaggatcagtgttacttcatagtatatggcaatgagttacagatgcagagatcttatttcgggactgtcgcggcagttaaaagattagatggggtgaagaaggtccgggcggaagtcgtgcatgaaaaggacgacttcgaaattggcgccaatgaagacatggagctggtagtgaaacggtttgtaccaaagttcgaaaatcaagacaaccaaataataggggcgttcgcaatgattaaaacggatgaaggtacggacttcacagttatgacgaaaaaggaaatagatcaaagttgggcgcaaacacgccagaagaacaataaggtacagcagaactttagtcaagaaatggcgaaacgtacagtccttaatcgtgccgctaagatgtttataaacacttcagacgattcggacttattaaccggggccataaatgacacgacctcaaacgagtatgacgatgaaagaagagatgtgacaccagtcgaggacgaaaaacagagcacggataaattactggaggggtttcagaagtcgcaggaggcgaaagcaaaaggggttagtaacgacggaaacagtaatgagggaaaagagacaagcgaggaggtggccgatggacagacggaactgttctctgaaggtactattaaaccagcagatgaagcggatagctaa

SEQ ID NO: 483 - DNA, 1062 bp, Artificial Sequence
  Synthetic Polynucleotide
atggcagaaaacgctgtaaccaagcaagacagtcccaaagcgcccgagaccatatcgcaggtattgcaagtgttagtgcctcaattagcaagagcagtccccaaagggatggatcctgacagaatagcacgcatagtgcagaccgaaatacgtaagtcccgtaatgccaaagctgccggcatcgcaaaacaatcgttagatgattgtacccaggagagttttgccggggcgctgcttacctcagcagccttaggtctggaaccaggagttaacggagagtgttatttggtcccataccgggatactcgtcgcggagttgttgagtgccaacttattatcggttaccagggaatagtgaagttgttctggcaacaccctcgtgcgtcccggattgacgcgcagtgggtaggtgcaaacgacgaattccactacactatgggccttaatccgacacttaaacacgtcaaagcgaaaggggatagaggaaacccggtgtacttttatgcaattgttgaggttactggagcagagccgttatgggatgtctttactgccgatgagatacgcgagctgcgtcgtggcaaggtcgggagttcaggggacattaaagatccccaacggtggatggagcggaagactgcgctgaaacaggtgttgaagttggcccccaaaacgacccgccttgacgctgcaatccgggcggatgatcgtcctgggactgacctgtcccaaagccaagccttagcccttccaagtactgtcaagccaaccgcagattacattgacggggaaatcgcagaaccgcacgaagttgacactcctccgaagagtagccgcgcacaacgtgcccagcgcgcgacggcaccagcgccggatgtgcagatggcaaatcctgaccaacttaaaagactgggagagatacagaaagcagagaagtacaacgacgcagattggtttaagtttttggcggacagcgctggcgtcaaagcaactcgtgcggccgacttgacctttgacgaagcgaaggcggtcatagatatgtttgatggtccaaacgcctga

SEQ ID NO: 484 - DNA, 747 bp, Artificial Sequence
  Synthetic Polynucleotide
atgggcaccgccctgaccccactcttgaccaagtttgccacgcggtatgagatgggcaccaccccagaggaagtggcgaacaccctcaagcagacctgctttaagggtcaggtcaatgatagccagatggtggccttgctgatcgtcgcggaccaatataaactgaatccatttaccaaggaactctatgcgtttccggataagaacaatggtattgtccccgtcgtcggcgtggacggttgggcgcggatcattaacgagaacccccaattcgatggcatggaattttcgatggaccagcaagggaccgaatgcacctgcaaaatctaccggaaagaccgtagccatgccattagcgccacggagtatatggccgaatgtaaacgtaatacgcagccatggcaatcccatccacgccggatgttgcgccacaaggcgatgatccagtgtgcgcggttggcctttggtttcgcgggcatctatgaccaggacgaagcggaacgcatcgtcgagcgggatgtgaccccggccgaacagtatgaggacgtgtcggaggcgatttgtctcatcaaagatagcccaacgatggaggatttgcaggccgccttcagcaacgcctggaaggcgtacaagaccaaaggtgcccgtgaccaactgacggccgcgaaggaccagcgtaagaaagaactgttggatgccccaattgatgtcgaatttgaggaaaccggggacgatcgggcggcgtaa

SEQ ID NO: 485 - DNA, 786 bp, Artificial Sequence
  Synthetic Polynucleotide
atgagcacggcgctcgcgacgctcgcggggaagctggccgagcgtgtgggcatggattcggtcgatccgcaggagctcatcaccacgctccggcagacggcctttaagtgtgacgcgagcgatgcccagtttatcgccctcctgatcgtggccaatcagtacggcctgaacccgtggacgaaggaaatctacgcctttcccgacaagcaaaacgggatcgtgccggtggtcggcgtcgatgggtggtcccgtatcatcaatgaaaatcagcaatttgatggcatggatttcgagcaagacaatgaatcctgcacgtgccgcatctatcggaaggaccgcaaccatccgatctgcgtgacggaatggatggatgagtgccgccgggagccctttaagacgcgggagggccgggaaatcaccgggccctggcagtcgcaccccaagcggatgctccgtcataaggcgatgatccaatgtgcccgcctcgccttcgggttcgcgggcatctacgacaaggatgaagccgagcgcatcgtggaaaatacggcctacacggcggagcgtcagccggaacgggatatcacgccggtcaatgacgaaacgatgcaggaaatcaataccctgctcatcgcgctcgacaagacctgggacgatgatctgctgcccctgtgtagccaaatcttccgtcgtgatatccgcgcctcgtccgaactgacccaagcggaggcggtgaaggccctggggttcctgaagcagaaggccaccgagcaaaaggtcgcggcctaa

SEQ ID NO: 486 - DNA, 747 bp, Artificial Sequence
  Synthetic Polynucleotide
atgggcacggcgctcacgccgctgctcaccaagtttgccacccgttacgagatggggaccacccccgaagaagtggcgaacaccctgaagcaaacgtgcttcaagggccaggtcaacgactcgcagatggtggccctgctcatcgtggccgatcagtataagctcaatccgttcaccaaggaactctacgcgtttcccgataagaacaatgggatcgtgccggtcgtcggcgtcgacggctgggcgcgtatcatcaatgaaaatccgcagttcgacggcatggaattctcgatggaccaacaagggaccgaatgtacgtgcaagatctatcgtaaggatcgttcgcacgcgatcagcgccacggaatacatggcggagtgtaagcggaatacgcagccgtggcaatcccacccccgccgtatgctgcgccataaggcgatgatccaatgtgcccgcctggcgtttgggttcgccggcatctacgatcaagatgaagcggagcggatcgtcgaacgcgatgtgacgcccgccgaacaatatgaagacgtgtcggaagcgatctgcctgatcaaggacagccccacgatggaagatctccaagcggcctttagcaatgcctggaaggcctacaagacgaagggggcgcgtgaccaactgacggcggccaaggatcaacggaagaaggagctgctggatgcgccgatcgatgtcgaattcgaggaaacgggggacgatcgtgccgcgtaa

SEQ ID NO: 487 - DNA, 537 bp, Artificial Sequence
  Synthetic Polynucleotide
atggcaagccgtggggttaacaaagttattcttgttggaaacttaggacaagacccggaagtgcgttatatgcctaatggaggcgcggtagccaatatcaccttggccacaagcgagtcttggcgagacaaagcaacaggtgaaatgaaagaacaaactgaatggcacagagtagttttgtttggaaaattggcagaggtagcctcagaatacttgcgaaagggcagtcaggtctatatagagggccaattgcgtacccgtaagtggacagaccagagcggacaagatcgttatacgaccgaggtcgttgttaatgtaggaggcacaatgcagatgttgggggggagacagggcggaggcgctccggctggaggcaatatcgggggtggccaacctcaaggtgggtgggggcagccacagcaaccgcaaggaggtaatcaatttagtggaggagcccaatcacgtccgcagcagtctgcgcctgccgccccttctaatgaaccgccgatggattttgacgatgatatacctttctga

SEQ ID NO: 488 - DNA, 498 bp, Artificial Sequence; identical to SEQ ID NO: 475
  Synthetic Polynucleotide

SEQ ID NO: 489 - DNA, 498 bp, Artificial Sequence
  Synthetic Polynucleotide
atggcgggagacacaacaattacggttgtgggaaacttgacagccgatcctgaattgcgattcaccccatcaggcgctgcggtggcgaatttcacagtcgcgagcaccccacgaatgtttgatagacaatcaggcgaatggaaggatggcgaagcgttgtttttacgatgcaacatctggagagaggcggccgagaacgtcgccgaaagccttacccgtggcagtcgagtgattgtaaccggacgattaaagcaaagaagttttgagacgagagaaggagagaaacgaactgtggtagaggtagaggtggatgaaataggtcctagtttgcgttatgccacagcgaaagtaaacaaagcctctcgtagtggtggcggggggggcggctttggttcagggggtggaggttcacgacagagcgagccaaaggatgatccttggggcagtgcccctgcatcaggcagttttagcggagcagatgacgagccgcctttttga

SEQ ID NO: 490 - DNA, 564 bp, Artificial Sequence
  Synthetic Polynucleotide
atgcttaatcgtgcagtcttaactgggcgtttaacaagagatcccgagttgcggtacacaaccagcgggacagcagttgtttcatttacgttagctgttgatcggcaattccgaaaccaaaatggtgatcgtgatgctgattttatcaattgcgttatttggcgtaaatccgctgaaaactttagtaactttacgcataagggttcacttgttggaattgaagggcgtattcaaacccggaattatgaaaaccaacagggtaaccgtgtgtatgttaccgaagttgttgtagataattttgcattgttagaacctcgtcaaaatggtggcatgaaccaatcaggggttcaacaaccatttaacagcaaccaacaatcatttggtgctcaggctccacaatatggtagtcaaccacaacctggaaataatgctcctcaaagtaatccgtcaccaagtatggataatggtttcgatcccaatcaaaatgctggcaaccagttccctggaagcagtgatgatggtggtcaatccattgatttagctgatgacgaattaccattctaa

SEQ ID NO: 491 - DNA, 501 bp, Artificial Sequence
  Synthetic Polynucleotide
atgattaacaatgttgtattagtgggacgcattactcgcgatcctgaacttcgttacacccctcaaaatcaagctgttgcaactttttcattggctgtaaatcgtcaatttaaaaatgctaacggtgaacgtgaggctgatttcattaactgcgttatttggcgccaacaagctgaaaatttggcaaattgggctaaaaaaggagctttgatcggtgtaactggtcgaattcaaacacgtaattatgaaaatcaacaaggtcaacgcgtttatgtgactgaggttgtggctgatagtttccaaatgttggaaagtagatctgctcgcgatggtatgggaggcggagcttctgccggttcatattctgcaccaagccaatctacaaataatactccacgtccacaaacgaataataatagtgcaacaccgaatttcggtcgtgatgctgacccatttggtagctcacctatggaaatctcggatgatgatcttccattctaa

SEQ ID NO: 492 - DNA, 447 bp, Artificial Sequence
  Synthetic Polynucleotide
atgcgtggggttaataaggtaatcttagttggtaacgtgggtggggacccggagacccgatatatgccaaatggaaacgcggtaacaaacatcacccttgcaactagtgagagttggaaagataaacaaactggccaacagcaagaacgtactgaatggcacagagtggtgttttttggcaaattagccgaaattgtcggccaacacgttaagaaaggccagcagctttacgtcgaagggtcattgcgaacccgtaagtggcaagcgcaggatggtcaggacagatatacgacagaaatcatagtagatatgcacggacaaatgcaaatgttcgggggaaaacctgggaatgagcaggccgcacagtcaagatcatctacccaacaacaaagcgccccgcaacaacgatcagcacaggatgaatttgatgatgatatacctttataa

SEQ ID NO: 493 - DNA, 537 bp, Artificial Sequence
  Synthetic Polynucleotide
atggccagcagaggcgtaaacaaggttattctcgttggtaatctgggtcaggacccggaagtacgctacatgccaaatggtggcgcagttgccaacattacgctggctacttccgaatcctggcgtgataaagcgaccggcgagatgaaagaacagactgaatggcaccgcgttgtgctgttcggcaaactggcagaagtggcgagcgaatatctgcgtaaaggttctcaggtttatatcgaaggtcagctgcgtacccgtaaatggaccgatcaatccggtcaggatcgctacaccacagaagtcgtggtgaacgttggcggcaccatgcagatgctgggtggtcgtcagggtggtggcgctccggcaggtggcaatatcggtggtggtcagccgcagggcggttggggtcagcctcagcagccgcagggtggcaatcagttcagcggcggcgcgcagtctcgcccgcagcagtccgctccggcagcgccgtctaacgagccgccgatggactttgatgatgacattccgttctga

SEQ ID NO: 494 - DNA, 498 bp, Artificial Sequence
  Synthetic Polynucleotide
atggctcgcggggtaaataaggtcattttggttggcaatgttggtggtgatcccgagacacgctatatgcctaacgggaacgccgtcactaatatcacactggcaacgtccgagtcatggaaggataaacagacaggtcaacagcaagaacgcacggagtggcaccgcgtggtatttttcgggcgtcttgctgagatcgccggagagtatttacgcaaaggatcgcaggtatacgttgagggttctttacgcacgcgcaagtggcagggtcaggatggtcaggaccgttatactaccgaaattgtagtcgacattaacgggaacatgcaattattaggtggtcgtccgagcggagatgactcccagcgcgccccccgcgagcccatgcagcgtccgcaacaggctccacagcagcagagccgccctgcccctcaacaacaacccgctcctcaacccgcgcaagattacgattcgtttgacgacgatattcctttttaa

SEQ ID NO: 495 - DNA, 498 bp, Artificial Sequence
  Synthetic Polynucleotide
atggcaggggataccacgataaccgttgtcggtaacttaaccgcggaccctgaacttcgtttcacaccatccggtgcagcggttgcaaacttcacggtcgcttctacgcctcgtatgttcgacagacagtctggtgagtggaaagatggggaagcactgtttttaagatgcaatatatggcgcgaagcagcagagaatgtagccgagagtttaaccagaggttcacgtgtgatcgtaactggccgtttgaaacaacgctcctttgaaacacgcgaaggcgagaaacgcacggtagttgaggtcgaagtcgacgagataggcccgtccttacgctatgccacagcgaaagtcaacaaagcgtctcgcagcggaggcggtgggggcgggtttggtagtggtggggggggtagtcgtcaatcggaacccaaggatgacccgtgggggtcggcaccagcttcaggaagtttttctggggccgatgacgagccgccattttga

SEQ ID NO: 496 - DNA, 564 bp, Artificial Sequence
  Synthetic Polynucleotide
atgctgaaccgtgccgtgcttactggtcgccttactcgtgaccctgaattgcgctatacgacatcagggactgcagtagtgtcctttacattggcggtcgatcgtcaatttcgtaaccaaaacggcgaccgcgacgccgattttatcaactgtgtgatttggagaaagagcgccgagaactttagcaatttcactcataaagggagtttagttggaatcgaggggcgtatccaaacgagaaactacgaaaaccagcaaggcaatcgcgtctacgtaaccgaagtcgtagtagataacttcgccctgttggaaccacggcaaaacggtgggatgaaccaatctggagttcaacaacccttcaacagtaaccagcagtctttcggggctcaggcacctcaatatggcagtcagccacaacctggaaacaatgccccacagtctaacccaagtccctctatggacaatgggtttgaccccaaccagaatgcggggaaccaattccctgggagctcggatgacggcggccaatcaattgatctggctgacgatgaattacccttttaa

SEQ ID NO: 497 - DNA, 498 bp, Artificial Sequence
  Synthetic Polynucleotide
atggcgcgtggggtgaacaaagtcatcctcgtggggaatgtcggtggcgatcccgaaacgcgttatatgccgaatgggaatgcggtcaccaatatcacgctcgccaccagcgagtcctggaaagataaacaaacgggtcaacagcaggagcgtacggagtggcatcgggtggtcttcttcgggcgcctcgccgagatcgccggggaatacctccgtaaaggttcgcaggtctatgtggagggctcgctgcggacccgtaaatggcaaggtcaggatggccaggatcggtacacgacggaaatcgtcgtggacattaacggtaatatgcaattgctcggtggccgcccctccggcgatgatagccagcgtgccccgcgtgaaccgatgcaacgcccgcaacaagcgccccaacagcaatcgcggcccgcgccgcagcagcagccggccccgcaaccagcccaggactacgattcgtttgatgatgacattccattttaa

SEQ ID NO: 498 - DNA, 498 bp, Artificial Sequence
  Synthetic Polynucleotide
atggcgcgtggggtcaataaggtgatcctggtcggcaacgtggggggcgatcccgaaacccggtacatgccgaacggcaacgcggtcaccaacatcaccctggcgaccagcgagagctggaaggataagcaaacgggccagcagcaagaacgtacggaatggcatcgtgtggtctttttcggccggctggcggagatcgcgggggaatacctccgtaaggggtcccaagtctacgtggagggctcgctgcggacccggaagtggcaagggcaagatgggcaagatcgctacaccacggagatcgtcgtcgacatcaacgggaacatgcagctcctcggggggcgtccctcgggggacgattcccaacgcgccccccgtgagcccatgcaacgcccgcagcaagcgccccagcaacaatcgcgtcccgccccccagcaacagccggcgccccaaccggcgcaggactacgactcgttcgacgatgatatccccttttaa

SEQ ID NO: 499 - DNA, 627 bp, Artificial Sequence
  Synthetic Polynucleotide
atgatagaacagcgtagtgatgaatggttcgcgcagcgacttggccgagtcaccgcgagtaaagtaaaggatgtcatggcgaaggggcgatcaggtgcgccatcagccaccagacagaattacatgatgcaattgttatgtgagagacttaccgggaaacgagaagaggggttcacgagtgcggcgatgcagcgtgggacggaccttgaaccaatagcgcgatcagcttatgagtttaacgcaggagtaatgactatagaaacaggccttattatccatccacgtatcgacggtttcggagctagtccggatgggcttgcgggagagcatggattagtggaaattaagtgcccgtcaacagcaacgcacatttataccatgcaaagtggtaagcacgaccctcagtacgaatggcaaatgcttgctcaaatgagttgctcaggcagagagtgggtggatttcgtgtcattcgacgatagattgccagacgaattgcaatatgtttgtttccgttatcaccgtgatgaagagagaataagagaaatggaaagcgaagttaaggcattcttggaggaattagctgaattggaacaccaaatgcgtgaacgtatgagaaaggcggcctaa

SEQ ID NO: 500 - DNA, 825 bp, Artificial Sequence
  Synthetic Polynucleotide
atgaaacttacggccaacaattactatagccatgagactgactggcaatatatgtcagtttcattgttcaaagacttcgaaaagtgcgaagcgcgtgcattagcaaagttgaaggaagattggcaacctgtttctagtccagttccgcttttggttgggaactatgtacacagttatttcgaaagtgctaagagccaccaagattttatagaggcgaataagaaagagcttatgaccagacctactaagacaaacccgaacggccatcttagagcggaatttaagggggcaaactcaatgattcagaccttgcaagccgacgatatgtttaactacttttatgcaccaggggacaaagaagttatcgttaccggagagatagacggctatttgtggaagggaaaaatagactctttagttcttgacaaaggctatttttgcgatcttaagacggtagacgacattcataagggacattggaatacgtatgaacacagatacgtcccgttcattcaagaccgagaatatgatttacaaatggctgtttatagagagttaatcaagcagacgttcgggaaaaagtgccaacctttaatttttgccatctctaagcaaactccgcctgacaagatggccatcgactttaatggcgttgatgacgactatcagatgcaggccgatcttgataaggtcaaagagcttcaaccacacttttggaaagtaatgacgggagaggaagagcctgtccactgtggtaagtgcgactattgtagagaaacgaaaatgttgagcggcttcatccacgcatcagaaatagaggtttaa

SEQ ID NO: 501 - DNA, 1527 bp, Artificial Sequence
  Synthetic Polynucleotide
atgcaccatcatcaccaccacggttccggcatggtttctaaaggtgaagaactgatcaaggaaaacatgcacatgaagctgtatatggaaggtaccgttaacaaccaccatttcaaatgcaccactgaaggtgaaggtaaaccgtacgagggtacgcagacccaacgtattaaagttgttgagggtggtccgctgccgttcgcgttcgacatcctggcgacctgtttcatgtacggctctaaaaccttcatcaaccacacccagggtatccctgacttcttcaaacagtctttcccggagggtttcacctgggaacgtgttaccacctacgaagacggtggtgtactgaccgttacccaggacacttctctgcaggacggttgcctgatctacaacgttaaactccgcggtgttaatttcccgtctaacggtccggttatgcaaaaaaagacgctgggttgggaagcgactacggaaactctctaccctgccgatggcggcctcgaaggtcgttgtgatatggcgctgaaactggttggtggcggtcacctgcactgcaatctgaaaactacctaccgttctaaaaaaccagctaaaaacctcaaaatgccgggtgtttactttgttgatcgtcgtctggaacgtatcaaagaagcagacaacgaaacttacgttgaacagcacgaagttgcggtggcgcgttactgcgacctgccatctaaactgggtcacaaaggtatggacgaactgtacaaataaaaaaaataggaggaaaaacatatgggttctcaccaccatcaccaccacagcggctctaaaggtgaagaattattcactggtgttgtcccaattttggttgaattagatggtgatgttaatggtcacaaattttctgtctccggtgaaggtgaaggtgatgctacgtacggtaaattgaccttaaaatttatttgtactactggtaaattgccagttccatggccaaccttagtcactactttcacttatggtgttcaatgtttttctagatacccagatcatatgaaacaacatgactttttcaagtctgccatgccagaaggttatgttcaagaaagaactatttttttcaaagatgacggtaactacaagaccagagctgaagtcaagtttgaaggtgataccttagttaatagaatcgaattaaaaggtattgattttaaagaagatggtaacattttaggtcacaaattggaatacaactataactctcacaatgtttacatcatggctgacaaacaaaagaatggtatcaaagttaacttcaaaattagacacaacattgaagatggttctgttcaattagctgaccattatcaacaaaatactccaattggtgatggtccagtcttgttaccagacaaccattacttatccactcaatctgccttatccaaagatccaaacgaaaagagagaccacatggtcttgttagaatttgttactgctgctggtattacccatggtatggatgaattgtacaaataa

SEQ ID NO: 502 - DNA, 1848 bp, Artificial Sequence
  Synthetic Polynucleotide
atgcctatacaagtgttgcctccacagttggccaaccaaatcgcggcaggcgaggtggtcgaacgtccggcttcagtcgttaaggaattggtaaaaaattctttggatgcaggggcaacgagaattgatattgacatcgaacgaggcggggccaagttaatcagaatccgagacaatgggtgtgggattaaaaaggatgaacttgctttggcgttggcacgtcacgcgaccagcaaaatagcgtctcttgacgacttggaagctattatcagtcttggtttccgtggggaagccttagcatctattagctctgtgtcacgtttgactttgactagcagaacggcggaacagcaggaagcatggcaagcgtatgcggaaggacgagacatgaacgtcacggttaagccggcagcccacccggtcggcacgaccttggaggtcttggacttgttctataatacccctgcacgtcgtaaattcttacgaaccgaaaagaccgaatttaaccatatagatgagataataagaagaattgcgttagcacgtttcgatgttactataaatttgagtcataacggaaaaatcgttagacagtatcgagccgtgcctgagggcgggcagaaggaaagaagattaggggctatttgtggcactgcttttcttgaacaagcacttgcgatcgaatggcaacatggggaccttaccttgcgaggttgggtagcggacccgaatcatacaacaccagcgttggcagagatacaatattgctatgtaaacggacgaatgatgagagatcgtttgatcaaccacgcaatacgacaggcttgcgaagataagttgggggcggatcaacagccagctttcgtcctttatcttgaaattgaccctcatcaggtagatgtgaatgtacatccggccaaacacgaggttcgttttcatcaaagtcgacttgtgcatgattttatataccagggtgtcttaagtgtcttgcagcagcagcttgagacacctttacctttagatgatgagccgcagccagctccgcgtagtatccctgagaatcgagttgccgccggcagaaatcatttcgcagaaccggcagcccgtgaacctgtagcaccgagatacaccccggctcctgcctctggatcacgtcctgctgccccgtggcctaacgcacaaccgggctatcagaagcagcagggtgaagtttatcgtcaattgttacaaactccggcaccaatgcaaaaacttaaggccccggagccgcaggaaccggcgcttgctgcaaattcacaatctttcggacgagttttaacaatagtgcatagtgactgcgcattacttgagcgtgacggcaacattagtttgctttcattgcctgttgccgagcgttggttgagacaagcacaattaacccctggtgaagcaccagtctgtgcacagccattattgatcccattgcgtttaaaggtctcagccgaggaaaagagtgctttggaaaaagcccaaagtgcccttgcagagcttggaattgatttccaaagcgacgcacaacacgttacgataagagcggttccattaccgttaagacagcaaaacttacaaattcttataccagagcttatcgggtatttggcgaaacagagcgtattcgaaccaggtaatatcgcccagtggatagcgcgtaaccttatgtcagaacacgcgcagtggagtatggcgcaagctatcacattgttagccgacgttgagcgtttgtgcccacagttggtgaaaacgcctccgggtggacttcttcaaagtgtggacttacatccagcaattaaggctcttaaagatgaataa

SEQ ID NO: 503 - DNA, 1971 bp, Artificial Sequence
  Synthetic Polynucleotide
gtgggaaaaattattgaactaaatgaagcgctcgccaatcaaattgctgctggagaggtggttgagcggcctgctagtgttgtcaaagaattagtcaaaaactcaattgatgctggaagcagtaaaattattatcaatgttgaagaagcaggtttgcgattaattgaagtcattgataatggtttgggcttagaaaaagaagatgtggctttggctttgcgtcgtcatgcgacaagtaaaatcaaagattcagctgatttatttcgaattagaacgctcggttttcggggtgaggctctgccgtcaatcgcttctgtcagtcagatgacgattgaaacaagtaatgctcaggaagaagctgggacaaaactgattgctaaaggtgggacgattgaaactttagaacctcttgcaaagcggttagggacaaaaatttctgttgcgaatcttttttataatacaccagcaaggctcaagtatatcaagtctttacaggctgaactttctcatattacagatattatcaatcgtttgagcctcgctcatccagagatttcttttactttagttaatgagggtaaagaatttttgaaaacggcgggaaatggagacttgcgccaagtgattgctgcaatttatggcattggaacggcgaaaaaaatgcgtgagattaatggctcggacttagattttgaactgacaggttatgtcagtttacccgagctgacaagagcgaatcgcaactatatcacgattttgattaatggtcgatttatcaagaattttttgttgaatcgagcaattttagaaggttacgggaaccgattgatggttggacgttttccttttgctgttttatcaattaaaattgaccctaaattagcagatgtcaatgtccatccgacaaaacaagaagtacgtttgtctaaggaacgtgaattgatgactttaatttctaaagcgattgatgagaccttatcagaaggggttttgattccagaagctttggaaaatttgcaaggtagagccaaggaaaaggggactgtttctgttcaaacggaacttcctttacagaataatcctttatactatgacaatgttcgtcaagatttttttgtcagagaagaagcgatttttgaaatcaataaaaacgataattcagattctctgactgaacaaaattctactgattatacagttaatcagccagaaactggttctgtcagtgaaaaaattacggacagaactgtcgaaagttcaaatgaatttactgacagaaccccaaaaaattctgtcagtaactttggagttgattttgataatattgagaagctgagtcagcaatcaacttttccccaactagaatacttggcacaattgcatgcgacttatttactttgtcagtcaaaagagggtctttatttggttgaccaacatgcggctcaggagcgaatcaagtatgaatattggaaagataaaatcggcgaagtgagcatggagcaacaaattttacttgcgccatatttatttactttacccaaaaatgattttattgttttagctgagaaaaaggatttattacatgaagcaggggttttcttggaagaatacggagaaaatcaattcatattaagagagcatccgatttggttaaaagaaactgagatagagaaatcaattaatgaaatgattgatattattctctcatcaaaagaattttcactcaaaaaatatcggcatgatttagccgcaatggttgcttgtaaaagctcaatcaaagccaaccatccccttgatgccgagtctgctagagctttgcttagagaattatcaacttgtaaaaatccttatagttgtgcgcatggacggccaacgattgtccatttttcaggagatgacattcaaaaaatgttccgcagaattcaagaaacgcatcgttcaaaagcggcctcttggaaagattttgagtaa

SEQ ID NO: 504 - DNA, 2035 bp, Artificial Sequence
  Synthetic Polynucleotide
atgattgaacttagtggcaaagatagaaagtatttgtataaactagtaaaatccaaaaaactaaattatgaacaaggtaatttatcgcatcaagttttaattgaaaacaagttagcaaaagtttactttacaagcgataaatatgatcctgacttaggggaacacataaatccacaaaatattattgctccaactagtacaggtttaagatataaaaatatttatcgtgaacaattatgggaaaaatattttactcctatttgggtatctacggcaacaacgactctaatatggttagcaaaatatttactagagaacttgctgtaacgctaagtaagattactatccatagctcttttttatcttttctcatctttccacctcctagcccactcgggctttttaatttaaaaattgtttaatctcatgaaacgccatgcctatttctaacagtaagataatgctgtcagtatagcgcctaagcgtttctttttgttctgattttttaatgtggtctttattcttcaactaaagcacccattagttcaacaaacgaaaattggataaagtgggatatttttaaaatatatatttatgttacagtaatattgacttttaaaaaaggattgattctaatgaagaaagcagacaagtaagcctcctaaattcactttagataaaaatttaggaggcatatcaaatgaacaaaaatataaaatattctcaaaactttttaacgagtgaaaaagtactcaaccaaataataaaacaattgaatttaaaagaaaccgataccgtttacgaaattggaacaggtaaagggcatttaacgacgaaactggctaaaataagtaaacaggtaacgtctattgaattagacagtcatctattcaacttatcgtcagaaaaattaaaactgaatactcgtgtcactttaattcaccaagatattctacagtttcaattccctaacaaacagaggtataaaattgttgggagtattccttaccatttaagcacacaaattattaaaaaagtggtttttgaaagccatgcgtctgacatctatctgattgttgaagaaggattctacaagcgtaccttggatattcaccgaacactagggttgctcttgcacactcaagtctcgattcagcaattgcttaagctgccagcggaatgctttcatcctaaaccaaaagtaaacagtgtcttaataaaacttacccgccataccacagatgttccagataaatattggaagctatatacgtactttgtttcaaaatgggtcaatcgagaatatcgtcaactgtttactaaaaatcagtttcatcaagcaatgaaacacgccaaagtaaacaatttaagtaccgttacttatgagcaagtattgtctatttttaatagttatctattatttaacgggaggaaataataatatgagataatgccgactgtactttttacagtcggttttctaatgtcactaacctgccccgttagttgaagaaggtttttatattacagctccacggttaaatttgtcgcctgactgtttaaagctcgttagactacgatattttccgcttgtcgtaagttgtacaagtaaatcaagaatgattttgtgatagtacggtttagactgcctgctttgcatgattgcggtgtctagtttgttcatggttagttatccttaacttgcaaaaaaatcaagttaatagttaaaatttttcatcaagtcataaatagaattttcttctaaatttgctgctctttctaattctttaaccttatcaagtgttaatttattcggagctaatctaatgcgatatagagcattatatgtgattcccatattcttcgctatcgcctcatatcttacccctgattgttttaaaatctcatcaagtggtttataagttttactcattttatctcctttctgatttttatgtttttcattctaacattaacttgatttttatgcaagtaataactttacttttttgcaagttttctcttgaaagtagtt

SEQ ID NO: 505 - DNA, 18 bp, Artificial Sequence
  Synthetic Polynucleotide
ttttggggagacgaccat

SEQ ID NO: 506 - DNA, 15 bp, Artificial Sequence
  Synthetic Polynucleotide
aaaaggaggtttttt

SEQ ID NO: 507 - DNA, 21 bp, Artificial Sequence
  Synthetic Polynucleotide
aaaaaataggaggaaaaacat

SEQ ID NO: 508 - DNA, 21 bp, Artificial Sequence
  Synthetic Polynucleotide
aaaaaaaaaaggaggtttttt

SEQ ID NO: 509 - DNA, 21 bp, Artificial Sequence
  Synthetic Polynucleotide
aaaaataaggtggaaaaacat

SEQ ID NO: 510 - DNA, 21 bp, Artificial Sequence
  Synthetic Polynucleotide
aaaaataaggaggtaaaacat

SEQ ID NO: 511 - DNA, 25 bp, Artificial Sequence
  Synthetic Polynucleotide
agctattcataaggaggtttagatt

SEQ ID NO: 512 - protein, 656 aa, Lactococcus lactis
MGKIIELNEALANQIAAGEVVERPASVVKELVENSIDAGSSKIIINVEEAGLRLIEVIDNGLGLEKEDVALALRRHATSKIKDSADLFRIRTLGFRGEALPSIASVSQMTIETSNAQEEAGTKLIAKGGTIETLEPLAKRLGTKISVANLFYNTPARLKYIKSLQAELSHITDIINRLSLAHPEISFTLVNEGKEFLKTAGNGDLRQVIAAIYGIGTAKKMREINGSDLDFELTGYVSLPELTRANRNYITILINGRFIKNFLLNRAILEGYGNRLMVGRFPFAVLSIKIDPKLADVNVHPTKQEVRLSKERELMTLISKAIDETLSEGVLIPEALENLQGRAKEKGTVSVQTELPLQNNPLYYDNVRQDFFVREEAIFEINKNDNSDSLTEQNSTDYTVNQPETGSVSEKITDRTVESSNEFTDRTPKNSVSNFGVDFDNIEKLSQQSTFPQLEYLAQLHATYLLCQSKEGLYLVDQHAAQERIKYEYWKDKIGEVSMEQQILLAPYLFTLPKNDFIVLAEKKDLLHEAGVFLEEYGENQFILREHPIWLKETEIEKSINEMIDIILSSKEFSLKKYRHDLAAMVACKSSIKANHPLDAESARALLRELSTCKNPYSCAHGRPTIVHFSGDDIQKMFRRIQETHRSKAASWKDFE

SEQ ID NO: 513 - protein, 656 aa, Artificial Sequence
  Synthetic Polypeptide
MGKIIELNEALANQIAAGEVVERPASVVKELVKNSIDAGSSKIIINVEEAGLRLIEVIDNGLGLEKEDVALALRRHATSKIKDSADLFRIRTLGFRGEALPSIASVSQMTIETSNAQEEAGTKLIAKGGTIETLEPLAKRLGTKISVANLFYNTPARLKYIKSLQAELSHITDIINRLSLAHPEISFTLVNEGKEFLKTAGNGDLRQVIAAIYGIGTAKKMREINGSDLDFELTGYVSLPELTRANRNYITILINGRFIKNFLLNRAILEGYGNRLMVGRFPFAVLSIKIDPKLADVNVHPTKQEVRLSKERELMTLISKAIDETLSEGVLIPEALENLQGRAKEKGTVSVQTELPLQNNPLYYDNVRQDFFVREEAIFEINKNDNSDSLTEQNSTDYTVNQPETGSVSEKITDRTVESSNEFTDRTPKNSVSNFGVDFDNIEKLSQQSTFPQLEYLAQLHATYLLCQSKEGLYLVDQHAAQERIKYEYWKDKIGEVSMEQQILLAPYLFTLPKNDFIVLAEKKDLLHEAGVFLEEYGENQFILREHPIWLKETEIEKSINEMIDIILSSKEFSLKKYRHDLAAMVACKSSIKANHPLDAESARALLRELSTCKNPYSCAHGRPTIVHFSGDDIQKMFRRIQETHRSKAASWKDFE

SEQ ID NO: 514 - protein, 615 aa, Escherichia coli
MPIQVLPPQLANQIAAGEVVERPASVVKELVENSLDAGATRIDIDIERGGAKLIRIRDNGCGIKKDELALALARHATSKIASLDDLEAIISLGFRGEALASISSVSRLTLTSRTAEQQEAWQAYAEGRDMNVTVKPAAHPVGTTLEVLDLFYNTPARRKFLRTEKTEFNHIDEIIRRIALARFDVTINLSHNGKIVRQYRAVPEGGQKERRLGAICGTAFLEQALAIEWQHGDLTLRGWVADPNHTTPALAEIQYCYVNGRMMRDRLINHAIRQACEDKLGADQQPAFVLYLEIDPHQVDVNVHPAKHEVRFHQSRLVHDFIYQGVLSVLQQQLETPLPLDDEPQPAPRSIPENRVAAGRNHFAEPAAREPVAPRYTPAPASGSRPAAPWPNAQPGYQKQQGEVYRQLLQTPAPMQKLKAPEPQEPALAANSQSFGRVLTIVHSDCALLERDGNISLLSLPVAERWLRQAQLTPGEAPVCAQPLLIPLRLKVSAEEKSALEKAQSALAELGIDFQSDAQHVTIRAVPLPLRQQNLQILIPELIGYLAKQSVFEPGNIAQWIARNLMSEHAQWSMAQAITLLADVERLCPQLVKTPPGGLLQSVDLHPAIKALKDE

SEQ ID NO: 515 - protein, 615 aa, Artificial Sequence
  Synthetic Polypeptide
MPIQVLPPQLANQIAAGEVVERPASVVKELVKNSLDAGATRIDIDIERGGAKLIRIRDNGCGIKKDELALALARHATSKIASLDDLEAIISLGFRGEALASISSVSRLTLTSRTAEQQEAWQAYAEGRDMNVTVKPAAHPVGTTLEVLDLFYNTPARRKFLRTEKTEFNHIDEIIRRIALARFDVTINLSHNGKIVRQYRAVPEGGQKERRLGAICGTAFLEQALAIEWQHGDLTLRGWVADPNHTTPALAEIQYCYVNGRMMRDRLINHAIRQACEDKLGADQQPAFVLYLEIDPHQVDVNVHPAKHEVRFHQSRLVHDFIYQGVLSVLQQQLETPLPLDDEPQPAPRSIPENRVAAGRNHFAEPAAREPVAPRYTPAPASGSRPAAPWPNAQPGYQKQQGEVYRQLLQTPAPMQKLKAPEPQEPALAANSQSFGRVLTIVHSDCALLERDGNISLLSLPVAERWLRQAQLTPGEAPVCAQPLLIPLRLKVSAEEKSALEKAQSALAELGIDFQSDAQHVTIRAVPLPLRQQNLQILIPELIGYLAKQSVFEPGNIAQWIARNLMSEHAQWSMAQAITLLADVERLCPQLVKTPPGGLLQSVDLHPAIKALKDE

SEQ ID NO: 516 - protein, 10 aa, Artificial Sequence
  Synthetic Polypeptide
PMDFDDDIPF

SEQ ID NO: 517 - protein, 9 aa, Artificial Sequence
  Synthetic Polypeptide
MDFDDDIPF

SEQ ID NO: 518 - protein, 8 aa, Artificial Sequence
  Synthetic Polypeptide
DFDDDIPF

SEQ ID NO: 519 - protein, 7 aa, Artificial Sequence
  Synthetic Polypeptide
FDDDIPF

SEQ ID NO: 520 - protein, 10 aa, Artificial Sequence
  Synthetic Polypeptide
YDSFDDDIPF

SEQ ID NO: 521 - protein, 9 aa, Artificial Sequence
  Synthetic Polypeptide
DSFDDDIPF

SEQ ID NO: 522 - protein, 8 aa, Artificial Sequence
  Synthetic Polypeptide
SFDDDIPF

SEQ ID NO: 523 - protein, 7 aa, Artificial Sequence
  Synthetic Polypeptide
FDDDIPF

SEQ ID NO: 524 - protein, 10 aa, Artificial Sequence
  Synthetic Polypeptide
FSGADDEPPF

SEQ ID NO: 525 - protein, 9 aa, Artificial Sequence
  Synthetic Polypeptide
SGADDEPPF

SEQ ID NO: 526 - protein, 8 aa, Artificial Sequence
  Synthetic Polypeptide
GADDEPPF

SEQ ID NO: 527 - protein, 7 aa, Artificial Sequence
  Synthetic Polypeptide
ADDEPPF

SEQ ID NO: 528 - protein, 10 aa, Artificial Sequence
  Synthetic Polypeptide
IDLADDELPF

SEQ ID NO: 529 - protein, 9 aa, Artificial Sequence
  Synthetic Polypeptide
DLADDELPF

SEQ ID NO: 530 - protein, 8 aa, Artificial Sequence
  Synthetic Polypeptide
LADDELPF

SEQ ID NO: 531 - protein, 7 aa, Artificial Sequence
  Synthetic Polypeptide
ADDELPF

SEQ ID NO: 532 - protein, 10 aa, Artificial Sequence
  Synthetic Polypeptide
MEISDDDLPF

SEQ ID NO: 533 - protein, 9 aa, Artificial Sequence
  Synthetic Polypeptide
EISDDDLPF

SEQ ID NO: 534 - protein, 8 aa, Artificial Sequence
  Synthetic Polypeptide
ISDDDLPF

SEQ ID NO: 535 - protein, 10 aa, Artificial Sequence
  Synthetic Polypeptide
IDISDDDLPF

SEQ ID NO: 536 - protein, 9 aa, Artificial Sequence
  Synthetic Polypeptide
DISDDDLPF

SEQ ID NO: 537 - protein, 7 aa, Artificial Sequence
  Synthetic Polypeptide
SDDDLPF

SEQ ID NO: 538 - protein, 10 aa, Artificial Sequence
  Synthetic Polypeptide
MEISDDDIPF

SEQ ID NO: 539 - protein, 10 aa, Artificial Sequence
  Synthetic Polypeptide
MEIFDDDIPF

SEQ ID NO: 540 - protein, 10 aa, Artificial Sequence
  Synthetic Polypeptide
MEDFDDDIPF

SEQ ID NO: 541 - protein, 10 aa, Artificial Sequence
  Synthetic Polypeptide
MMDFDDDIPF

SEQ ID NO: 542 - protein, 10 aa, Artificial Sequence
  Synthetic Polypeptide
MEIFDDDIPF

SEQ ID NO: 543 - protein, 10 aa, Artificial Sequence
  Synthetic Polypeptide
MESFDDDIPF

SEQ ID NO: 544 - protein, 10 aa, Artificial Sequence
  Synthetic Polypeptide
MEIADDEPPF

SEQ ID NO: 545 - protein, 10 aa, Artificial Sequence
  Synthetic Polypeptide
MEGADDEPPF

SEQ ID NO: 546 - protein, 10 aa, Artificial Sequence
  Synthetic Polypeptide
IDLADDEPPF

SEQ ID NO: 547 - protein, 10 aa, Artificial Sequence
  Synthetic Polypeptide
EDGADDEPPF

SEQ ID NO: 548 - protein, 633 aa, Pseudomonas aeruginosa
MSEAPRIQLLSPRLANQIAAGEVVERPASVAKELLENSLDAGSRRIDVEVEQGGIKLLRVRDDGRGIPADDLPLALARHATSKIRELEDLERVMSLGFRGEALASISSVARLTMTSRTADAGEAWQVETEGRDMQPRVQPAAHPVGTSVEVRDLFFNTPARRKFLRAEKTEFDHLQEVIKRLALARFDVAFHLRHNGKTIFALHEARDELARARRVGAVCGQAFLEQALPIEVERNGLHLWGWVGLPTFSRSQPDLQYFYVNGRMVRDKLVAHAVRQAYRDVLYNGRHPTFVLFFEVDPAVVDVNVHPTKHEVRFRDSRMVHDFLYGTLHRALGEVRPDDQLAPPGATSLTEPRPTGAAAGEFGPQGEMRLAESVLESPAARVGWSGGSSASGGSSGYSAYTRPEAPPSLAEAGGAYKAYFAPLPAGEAPAALPESAQDIPPLGYALAQLKGIYILAENAHGLVLVDMHAAHERITYERLKVAMASEGLRGQPLLVPESIAVSEREADCAEEHSSWFQRLGFELQRLGPESLAIRQIPALLKQAEATQLVRDVIADLLEYGTSDRIQAHLNELLGTMACHGAVRANRRLTLPEMNALLRDMEITERSGQCNHGRPTWTQLGLDELDKLFLRGR

SEQ ID NO: 549 - protein, 633 aa, Artificial Sequence
  Synthetic Polypeptide
MSEAPRIQLLSPRLANQIAAGEVVERPASVAKELLKNSLDAGSRRIDVEVEQGGIKLLRVRDDGRGIPADDLPLALARHATSKIRELEDLERVMSLGFRGEALASISSVARLTMTSRTADAGEAWQVETEGRDMQPRVQPAAHPVGTSVEVRDLFFNTPARRKFLRAEKTEFDHLQEVIKRLALARFDVAFHLRHNGKTIFALHEARDELARARRVGAVCGQAFLEQALPIEVERNGLHLWGWVGLPTFSRSQPDLQYFYVNGRMVRDKLVAHAVRQAYRDVLYNGRHPTFVLFFEVDPAVVDVNVHPTKHEVRFRDSRMVHDFLYGTLHRALGEVRPDDQLAPPGATSLTEPRPTGAAAGEFGPQGEMRLAESVLESPAARVGWSGGSSASGGSSGYSAYTRPEAPPSLAEAGGAYKAYFAPLPAGEAPAALPESAQDIPPLGYALAQLKGIYILAENAHGLVLVDMHAAHERITYERLKVAMASEGLRGQPLLVPESIAVSEREADCAEEHSSWFQRLGFELQRLGPESLAIRQIPALLKQAEATQLVRDVIADLLEYGTSDRIQAHLNELLGTMACHGAVRANRRLTLPEMNALLRDMEITERSGQCNHGRPTWTQLGLDELDKLFLRGR

What is claimed is:

1. A recombinant bacterial cell of a first genus comprising a single-stranded annealing protein (SSAP) from a bacteriophage that can infect, or from a prophage that is stably integrated into the genome of, a bacterial cell of a second genus different from the first genus, optionally wherein the SSAP is expressed from a non-native promoter.

2. The recombinant bacterial cell of claim 1, wherein the recombinant bacterial cell of a first genus is gram negative, and the bacterial cell of a second genus is gram positive, or wherein the recombinant bacterial cell of a first genus is gram positive, and the bacterial cell of a second genus is gram negative.

3. The recombinant bacterial cell of claim 1, wherein the recombinant bacterial cell of a first genus is gram positive, and the bacterial cell of a second genus is gram positive, or wherein the recombinant bacterial cell of a first genus is gram negative, and the bacterial cell of a second genus is gram negative.

4. The recombinant bacterial cell of claim 2 or 3, wherein the gram-negative bacterial cell is an Escherichia coli (E. coli) cell, a Klebsiella pneumoniae (K. pneumoniae) cell, a Salmonella enterica (S. enterica) cell, a Pseudomonas aeruginosa (P. aeruginosa), a Citrobacter freundii (C. freundii), and a Agrobacterium tumefaciens (A. tumefaciens) cell.

5. The recombinant bacterial cell of claim 4, wherein:
the recombinant bacterial cell is a gram-negative E. coli cell, optionally wherein the SSAP comprises the amino acid sequence of SEQ ID NO: 19, 63, 128, 157, 201, or 210; or
the recombinant bacterial cell is a gram-negative A. tumefaciens cell, optionally wherein the SSAP comprises the amino acid sequence of SEQ ID NO: 3, 205, 208, or 210.

6. The recombinant bacterial cell of any one of claims 1-5, wherein the gram-positive bacterial cell is selected from the group consisting of a Lactococcus lactis (L. lactis) cell, a Lactobacillus rhamnosus (L. rhamnosus) cell, a Mycobacterium smegmatis (M. smegmatis) cell, a Collinsella stercoris (C. stercoris) cell, and a Staphylococcus aureus (S aureus) cell.

7. The recombinant bacterial cell of claim 6, wherein
the recombinant bacterial cell is a gram-positive L. lactis cell, optionally wherein the SSAP comprises the amino acid sequence of SEQ ID NO: 5 or 143;
the recombinant bacterial cell is a gram-positive M. smegmatis cell, optionally wherein the SSAP comprises the amino acid sequence of SEQ ID NO: 44; or
the recombinant bacterial cell is a gram-positive S. aureus cell, optionally wherein the SSAP comprises the amino acid sequence of SEQ ID NO: 32, 41, 49, 71, 89, or 143.

8. The recombinant bacterial cell of any one of claims 1-7 further comprising a single-stranded binding protein (SSB).

9. The recombinant bacterial cell of claim 8, wherein the SSB is from a bacteriophage that can infect or from a prophage that is stably integrated into the genome of Clostridium botulinum, Gordonia soli, Paeniclostridium sordellii, or Enterococcus faecalis.

10. The recombinant bacterial cell of claim 8, wherein:
the recombinant bacterial cell is a gram-negative E. coli cell;
the SSAP comprises the amino acid sequence of SEQ ID NO: 157; and
the SSB comprises the amino acid sequence of SEQ ID NO: 300, 382, 384, or 389.

11. The recombinant bacterial cell of claim 6, wherein:
the recombinant bacterial cell is a gram-positive L. lactis cell;
the SSAP comprises the amino acid sequence of SEQ ID NO: 5; and
the SSB comprises the amino acid sequence of SEQ ID NO: 366, 381, or 395.

12. The recombinant bacterial cell of claim 6, wherein:
the recombinant bacterial cell is a gram-positive L. lactis cell;
the SSAP comprises the amino acid sequence of SEQ ID NO: 143; and
the SSB comprises the amino acid sequence of SEQ ID NO: 262, 325, 366, or 381.

13. A recombinant bacterial cell comprising a single-stranded annealing protein (SSAP) from a bacteriophage that can infect or from a prophage that is stably integrated into the genome of Pseudomonas aeruginosa, wherein the SSAP is expressed from a non-native promoter.

14. The recombinant bacterial cell of claim 13, wherein the SSAP comprises the amino acid sequence of SEQ ID NO: 24.

15. The recombinant bacterial cell of claim 13 or 14 wherein the recombinant bacterial cell is selected from the group consisting of a recombinant Klebsiella pneumoniae cell, a recombinant Salmonella enterica cell, and a recombinant Citrobacter freundii cell.

16. The recombinant bacterial cell of any one of claims 13-15, wherein the cell further comprises a single-stranded binding protein (SSB).

17. The recombinant bacterial cell of any one of claims 13-16, wherein the cell further comprises an exogenous nucleic acid comprising a sequence of interest that binds to a target locus of the cell, wherein the sequence of interest comprises a nucleotide modification relative to the target locus.

18. A recombinant bacterial cell comprising a single-stranded annealing protein (SSAP) and/or a single-stranded binding protein (SSB) of Table 1 expressed from a non-native promoter.

19. A recombinant bacterial cell comprising:
(a) a single-stranded annealing protein (SSAP) from a bacteriophage that can infect or from a prophage that is stably integrated into the genome of a first type of bacterial cell; and
(b) a chimeric single-stranded binding protein (SSB), wherein the chimeric SSB comprises a sequence encoding a first SSB from a second type of bacterial cell, wherein the C-terminus of the first SSB is substituted with at least 7 amino acids from the C-terminus of a second SSB from the first type of bacterial cell.

20. The recombinant bacterial cell of claim 19, wherein the C-terminus of the chimeric SSB comprises a sequence selected from SEQ ID NOs: 516-537 and 539-547.

21. The recombinant bacterial cell of any one of claims 1-20 further comprising an exogenous nucleic acid that comprises a sequence of interest that binds to a target locus of the cell, wherein the sequence of interest comprises a nucleotide modification relative to the target locus.

22. The recombinant bacterial cell of claim 21, wherein the nucleic acid is a single-stranded DNA or a double-stranded DNA.

23. The recombinant bacterial cell of claim 21 or 22, wherein the exogenous nucleic acid is integrated in the genome of the cell.

24. The recombinant bacterial cell of any one of claims 1-23, wherein the SSAP is encoded by a nucleic acid that is codon-optimized for expression in the recombinant bacterial cell.

25. The recombinant bacterial cell of any one of claims 8-24, wherein the SSB is encoded by a nucleic acid that is codon-optimized for expression in the recombinant bacterial cell.

26. The recombinant bacterial cell of any one of claims 1-25 further comprising a dominant negative MutL protein, optionally wherein the dominant negative MutL protein comprises an amino acid substitution corresponding to E32K in E. coli wild-type MutL (SEQ ID NO: 514), E33K in L. lactis wild-type MutL (SEQ ID NO: 512), or E36K in P. aeruginosa wild-type MutL (SEQ ID NO: 548).

27. The recombinant bacterial cell of any one of claims 1-26, wherein the SSAP is expressed from a vector comprising a ribosome binding site (RBS).

28. The recombinant bacterial cell of any one of claims 8-27, wherein the SSB is expressed from a vector comprising a ribosome binding site (RBS).

29. The recombinant bacterial cell of claim 27 or 28, wherein the RBS comprises a sequence selected from SEQ ID NOs: 505-511.

30. A method, comprising
culturing the recombinant bacterial cell of any one of claims 1-29 and producing a modified recombinant bacterial cell comprising the sequence of interest at the target locus.

31. A method, comprising:
culturing the recombinant bacterial cell of any one of claims 1-20, wherein the recombinant bacterial cell further comprises a nucleic acid comprising a sequence of interest that binds to a target locus of the recombinant bacterial cell, and wherein the sequence of interest comprises a nucleotide modification relative to the target locus; and
producing a modified recombinant bacterial cell comprising the sequence of interest at the target locus.

32. The method of claim 31, wherein the modification is a mutation (substitution), insertion, and/or deletion.

33. A method of editing the genome of bacterial cells, comprising
performing multiplexed automatable genome engineering (MAGE) in recombinant bacterial cells of any one of claims 1-20, wherein the recombinant bacterial cells further comprise at least two exogenous nucleic acids, each comprising a sequence of interest that binds to at least one target locus of the recombinant bacterial cells, wherein the sequence of interest comprises a nucleotide modification relative to the target locus, and
producing modified recombinant bacterial cells comprising the sequence of interest at the target locus.

34. The method of claim 33, wherein the recombinant bacterial cells comprise an SSB from a bacteriophage that can infect or from a prophage that is stably integrated into the genome of Paeniclostridium sordellii, optionally wherein the SSB comprises the amino acid sequence of SEQ ID NO: 384.

35. The method of claim 33 or 34, wherein at least 50% or at least 75% of the cells comprise the sequence of interest, optionally following 5-10 cycles of MAGE.

36. The method of claim 35, wherein at least 95% of the cells comprise the sequence of interest following 15 cycles of MAGE.

37. The method of claim 36, wherein following 15 cycles of MAGE, the percentage of cells comprising the sequence of interest is at least four-fold greater as compared to control E. coli cells that comprise (a) a Redβ SSAP from Enterobacteria phage X, (SEQ ID NO: 474) and (b) the at least two exogenous nucleic acids, each comprising the sequence of interest that binds to a different target locus of the control E. coli cell genome, wherein the sequence of interest comprises the nucleotide modification relative to the target locus.

38. A method, comprising
(i) introducing into a recombinant cell: (a) a single-stranded annealing protein (SSAP), (b) a single-stranded binding protein (SSB), and (c) a double-stranded nucleic acid comprising a sequence of interest that binds to a genomic target locus of the recombinant cell, wherein the sequence of interest comprises a nucleotide modification relative to the target locus, and
(ii) producing a modified recombinant cell comprising the sequence of interest at the target locus, wherein the modified recombinant cell does not express an exogenous exonuclease.

39. The method of claim 38, wherein (a) and (b) are from the same species of bacteria or from different species of bacteria.

40. The method of claim 38 or 39, wherein the SSAP comprises SEQ ID NO: 24 and/or the SSB comprises SEQ ID NO: 472.
